(19) United States
(12) Patent Application Publication
(10) Pub. No.: US 2024/0368571 A1
(43) Pub. Date: Nov. 7, 2024

(54) EUBACTERIUM RECTALE CAS12A MUTANTS

(71) Applicant: INTEGRATED DNA TECHNOLOGIES, INC., Coralville, IA (US)

(72) Inventors: Christopher Anthony VAKULSKAS, North Liberty, IA (US); Adam BRAINARD, Cedar Rapids, IA (US); Liyang ZHANG, North Liberty, IA (US)

(21) Appl. No.: 18/647,516

(22) Filed: Apr. 26, 2024

Related U.S. Application Data
(60) Provisional application No. 63/462,772, filed on Apr. 28, 2023.

(51) Int. Cl. C12N 9/22; C12N 15/11; C12N 15/70

(52) U.S. Cl. CPC C12N 9/22; C12N 15/111; C12N 15/70; C12N 2310/20

(57) ABSTRACT

Described herein is a series of recombinantly engineered Cas12a proteins from Eubacterium rectale. In one aspect, various mutations to the wild type Eubacterium rectale Cas12a polypeptide (ERCAS12A) are provided that have enhanced activity.

### CROSS-REFERENCE TO RELATED APPLICATIONS

[0001] This application claims priority to U.S. Provisional Patent Application No. 63/462,772, filed on Apr. 28, 2023, which is incorporated by reference herein in its entirety.

### REFERENCE TO SEQUENCE LISTING

[0002] This application was filed with a Sequence Listing XML in ST.26 XML format accordance with 37 C.F.R. § 1.831 and PCT Rule 13ter. The Sequence Listing XML file submitted in the USPTO Patent Center, “013670-0028-WOO1_sequence_listing_xml_25 Apr. 2024.xml,” was created on Apr. 25, 2024, contains 1667 sequences, has a file size of 1.94 Mbytes (2,043,904 bytes), and is incorporated by reference in its entirety into the specification.

### BACKGROUND

[0003] Eubacterium rectale Cas12a (ERCAS12A) is an engineered RNA-guided endonuclease from Eubacterium rectale (now called Agathobacter rectalis) Clustered Regularly Interspaced Short Palindromic Repeat (CRISPR) adaptive immune system. Zetsche et al., Cell 163: 759-771 (2015), which is incorporated by reference herein for such teachings. Cas12a is guided to a ˜21-24-nt DNA target sequence, or commonly referred as protospacer, by a target site-specific ˜21-24-nt complementary RNA. The Cas12a-gRNA ribonucleoprotein (RNP) complex mediates double-stranded DNA breaks (DSBs), which are then repaired by either the non-homologous end joining (NHEJ) which typically introduces mutations or indels at the cut site, or the homology directed repair (HDR) system for precise editing if a suitable template nucleic acid is present.

[0004] Critical to the recognition of correct DNA target for ERCAS12A variants include both crRNA and the canonical “TTTV” protospacer adjacent motif (PAM), which is a 4-bp sequence immediately upstream of the protospacer. Compared to the 2-bp NGG PAM of Cas9 from Streptococcus pyogenes, Cas12a expanded the targetable loci in genome editing, particularly over the T-rich sites that are inaccessible to the Cas9 system. Jinek et al., Science 337: 816-821 (2012), which is incorporated by reference herein for such teachings. Although the occurrence of targetable sites of Cas12a on the genome is less frequent than Cas9, ERCAS12A is an alternative enzyme for use in genome engineering applications. Improving the cleavage activity and associated genome editing efficiency of ERCAS12A would greatly facilitate the development of human cell therapies with enhanced properties.

[0005] Previous studies improved the utility of Cas12a from Lachnospiraceae bacterium ND2006 (LbCas12a) and Acidaminococcus sp. (AsCas12a). See, e.g., Gao et al., Nat. Biotechnol. 35(8): 789-792 (2017); Kleinstiver et al., Nat. Biotechnol. 37(3): 276-282 (2019); Zhang et al., Nat. Communications 12: 3908 (2021); U.S. Pat. App. Pub. Nos. US 2021/0348144 A1 and US 2023/0040148 A1, each of which are incorporated by reference herein for such teachings. However, transferring beneficial mutations from AsCas12a and LbCas12a to ERCAS12A was not simple or predictable. Despite significant structural similarity between these homologous proteins, most point mutations that improved the activity of AsCas12a and LbCas12a were detrimental to ERCAS12A.

[0006] What is needed are mutations that enhance the activity of ERCAS12A.

### SUMMARY

[0007] One embodiment described herein is an isolated polypeptide comprising an Eubacterium rectale Cas12a (ERCAS12A) mutant having one or more amino acid substitutions introduced into a wild-type ERCAS12A polypeptide sequence of SEQ ID NO: 2, where the ERCAS12A mutant polypeptide provides an improvement in nuclease activity as compared to the wild-type ERCAS12A polypeptide. In one aspect, the ERCAS12A mutant has 98% to 99% identity to a polypeptide sequence selected from the even numbered sequences of SEQ ID NO: 4-210. In another aspect, the ERCAS12A mutant has a polypeptide sequence selected from the even numbered sequences of SEQ ID NO: 4-210. In another aspect, the ERCAS12A mutant comprises one or more amino acid substitution at positions 18, 35, 39, 39, 40, 56, 56, 59, 59, 158, 165, 181, 290, 291, 296, 297, 297, 297, 303, 303, 305, 307, 353, 444, 465, 469, 470, 498, 507, 507, 507, 510, 510, 510, 512, 512, 513, 513, 513, 513, 514, 514, 515, 516, 516, 517, 518, 520, 522, 541, 553, 556, 556, 562, 562, 562, 583, 585, 653, 712, 716, 731, 732, 744, 744, 744, 748, 751, 754, 757, 757, 771, 787, 825, 826, 826, 832, 836, 836, 839, 840, 907, 907, 916, 935, 936, 974, or 1019 of the wild-type ERCAS12A polypeptide sequence of SEQ ID NO: 2. In another aspect, the ERCAS12A mutant comprises one or more amino acid substitutions selected from Q18V, 135L, G39K, G39Q, 140Q, D56P, D56R, D59A, D59R, S158G, K165Y, S181V, A290K, D291N, V296R, P297F, P297R, P297V, D303C, D303R, E305K, Y307K, Q353R, L444W, F465R, S469K, V470K, 1498K, Y507R, Y507S, Y507W, Q510K, Q510V, Q510Y, P512G, P512V, Y513G, Y513L, Y513R, Y513S, S514P, S514R, T515P, K516P, K516R, K517P, 1518P, L520M, F522A, A541V, G553M, N556E, N556R, D5621, D562K, D562V, N583V, L585K, F653R, K712R, N716R, E731P, N732T, A744N, A744P, A744T, F748A, S751A, K754G, 1757K, 1757W, E771R, N787A, A825R, T826F, T826K, Y832R, Y836K, Y836Q, Y839L, F840L, Y9071, Y907V, Q916Y, E935R, 1936R, K974G, K1019V, or combinations thereof of the wild-type ERCAS12A polypeptide sequence of SEQ ID NO: 2. In another aspect, the ERCAS12A mutant is selected from: Q18V (SEQ ID NO: 4); 135L (SEQ ID NO: 6); G39Q (SEQ ID NO: 8); G39K (SEQ ID NO: 10); 140Q (SEQ ID NO: 12); D56R (SEQ ID NO: 14); D56P (SEQ ID NO: 16); D59R (SEQ ID NO: 18); D59A (SEQ ID NO: 20); S158G (SEQ ID NO: 22); K165Y (SEQ ID NO: 24); S181V (SEQ ID NO: 26); A290K (SEQ ID NO: 28); D291N (SEQ ID NO: 30); V296R (SEQ ID NO: 32); P297V (SEQ ID NO: 34); P297R (SEQ ID NO: 36); P297F (SEQ ID NO: 38); D303R (SEQ ID NO: 40); D303C (SEQ ID NO: 42); E305K (SEQ ID NO: 44); Y307K (SEQ ID NO: 46); Q353R (SEQ ID NO: 48); L444W (SEQ ID NO: 50); F465R (SEQ ID NO: 52); S469K (SEQ ID NO: 54); V470K (SEQ ID NO: 56); 1498K (SEQ ID NO: 58); Y507W (SEQ ID NO: 60); Y507S (SEQ ID NO: 62); Y507R (SEQ ID NO: 64); Q510Y (SEQ ID NO: 66); Q510V (SEQ ID NO: 68); Q510K (SEQ ID NO: 70); P512V (SEQ ID NO: 72); P512G (SEQ ID NO: 74); Y513S (SEQ ID NO: 76); Y513R (SEQ ID NO: 78); Y513L (SEQ ID NO: 80); Y513G (SEQ ID NO: 82); S514R (SEQ ID NO: 84); S514P (SEQ ID NO: 86); T515P (SEQ ID NO: 88); K516R (SEQ ID NO: 90); K516P (SEQ ID NO: 92); K517P (SEQ ID NO: 94); 1518P (SEQ ID NO: 96); L520M (SEQ ID NO: 98); F522A (SEQ ID NO: 100); A541V (SEQ ID NO: 102); G553M (SEQ ID NO: 104); N556R (SEQ ID NO: 106); N556E (SEQ ID NO: 108); D562V (SEQ ID NO: 110); D562K (SEQ ID NO: 112); D5621 (SEQ ID NO: 114); N583V (SEQ ID NO: 116); L585K (SEQ ID NO: 118); F653R (SEQ ID NO: 120); K712R (SEQ ID NO: 122); N716R (SEQ ID NO: 124); E731P (SEQ ID NO: 126); N732T (SEQ ID NO: 128); A744T (SEQ ID NO: 130); A744P (SEQ ID NO: 132); A744N (SEQ ID NO: 134); F748A (SEQ ID NO: 136); S751A (SEQ ID NO: 138); K754G (SEQ ID NO: 140); 1757W (SEQ ID NO: 142); 1757K (SEQ ID NO: 144); E771R (SEQ ID NO: 146); N787A (SEQ ID NO: 148); A825R (SEQ ID NO: 150); T826K (SEQ ID NO: 152); T826F (SEQ ID NO: 154); Y832R (SEQ ID NO: 156); Y836Q (SEQ ID NO: 158); Y836K (SEQ ID NO: 160); Y839L (SEQ ID NO: 162); F840L (SEQ ID NO: 164); Y907V (SEQ ID NO: 166); Y9071 (SEQ ID NO: 168); Q916Y (SEQ ID NO: 170); E935R (SEQ ID NO: 172); 1936R (SEQ ID NO: 174); K974G (SEQ ID NO: 176); K1019V (SEQ ID NO: 178); 135L/S469K (SEQ ID NO: 180); 135L/T826F (SEQ ID NO: 182); 140Q/S469K (SEQ ID NO: 184); 140Q/T826F (SEQ ID NO: 186); S469K/K516P (SEQ ID NO: 188); S469K/T826F (SEQ ID NO: 190); Y513G/Y832R (SEQ ID NO: 192); Y513G/F840L (SEQ ID NO: 194); 135L/S469K/T826F (SEQ ID NO: 196); 140Q/S469K/T826F (SEQ ID NO: 198); S469K/K516P/T826F (SEQ ID NO: 200); S469K/T826F/F840L (SEQ ID NO: 202); D303R/S469K/T826F/F840L (SEQ ID NO: 204); F465R/S469K/T826F/F840L (SEQ ID NO: 206); D303R/F465R/S469K/T826F/F840L (SEQ ID NO: 208); or D303R/S469K/K516P/T826F/F840L (SEQ ID NO: 210). In another aspect, the ERCAS12A mutant is selected from D303R/S469K/T826F/F840L (SEQ ID NO: 204); F465R/S469K/T826F/F840L (SEQ ID NO: 206); D303R/F465R/S469K/T826F/F840L (SEQ ID NO: 208); or D303R/S469K/K516P/T826F/F840L (SEQ ID NO: 210).

[0008] Another embodiment described herein is an isolated polynucleotide sequence encoding an Eubacterium rectale Cas12a (ERCAS12A) mutant having one or more amino acid substitutions introduced into a wild-type ERCAS12A polypeptide sequence of SEQ ID NO: 2, where the ERCAS12A mutant provides improved gene editing as compared to the wild-type ERCAS12A polypeptide. In one aspect, the encoded ERCAS12A mutant has 98% to 99% identity to a polypeptide sequence selected from the even numbered sequences of SEQ ID NO: 4-210. In another aspect, the encoded ERCAS12A mutant has a polypeptide sequence selected from the even numbered sequences of SEQ ID NO: 4-210. In another aspect, the ERCAS12A mutant polynucleotide sequence has 95% to 99% identity to a nucleotide sequence selected from the odd numbered sequences of SEQ ID NO: 3-209. In another aspect, the ERCAS12A mutant polynucleotide has a nucleotide sequence selected from the odd numbered sequences of SEQ ID NO: 3-209. In another aspect, the encoded ERCAS12A mutant comprises one or more amino acid substitution at positions 18, 35, 39, 39, 40, 56, 56, 59, 59, 158, 165, 181, 290, 291, 296, 297, 297, 297, 303, 303, 305, 307, 353, 444, 465, 469, 470, 498, 507, 507, 507, 510, 510, 510, 512, 512, 513, 513, 513, 513, 514, 514, 515, 516, 516, 517, 518, 520, 522, 541, 553, 556, 556, 562, 562, 562, 583, 585, 653, 712, 716, 731, 732, 744, 744, 744, 748, 751, 754, 757, 757, 771, 787, 825, 826, 826, 832, 836, 836, 839, 840, 907, 907, 916, 935, 936, 974, or 1019 of the wild-type ERCAS12A polypeptide sequence of SEQ ID NO: 2. In another aspect, the encoded ERCAS12A mutant comprises one or more amino acid substitutions selected from Q18V, 135L, G39K, G39Q, 140Q, D56P, D56R, D59A, D59R, S158G, K165Y, S181V, A290K, D291N, V296R, P297F, P297R, P297V, D303C, D303R, E305K, Y307K, Q353R, L444W, F465R, S469K, V470K, 1498K, Y507R, Y507S, Y507W, Q510K, Q510V, Q510Y, P512G, P512V, Y513G, Y513L, Y513R, Y513S, S514P, S514R, T515P, K516P, K516R, K517P, 1518P, L520M, F522A, A541V, G553M, N556E, N556R, D5621, D562K, D562V, N583V, L585K, F653R, K712R, N716R, E731P, N732T, A744N, A744P, A744T, F748A, S751A, K754G, 1757K, 1757W, E771R, N787A, A825R, T826F, T826K, Y832R, Y836K, Y836Q, Y839L, F840L, Y9071, Y907V, Q916Y, E935R, 1936R, K974G, K1019V, or combinations thereof of the wild-type ERCAS12A polypeptide sequence of SEQ ID NO: 2. In another aspect, encoded ERCAS12A mutant polynucleotide is selected from is selected from: Q18V (SEQ ID NO: 4); 135L (SEQ ID NO: 6); G39Q (SEQ ID NO: 8); G39K (SEQ ID NO: 10); 140Q (SEQ ID NO: 12); D56R (SEQ ID NO: 14); D56P (SEQ ID NO: 16); D59R (SEQ ID NO: 18); D59A (SEQ ID NO: 20); S158G (SEQ ID NO: 22); K165Y (SEQ ID NO: 24); S181V (SEQ ID NO: 26); A290K (SEQ ID NO: 28); D291N (SEQ ID NO: 30); V296R (SEQ ID NO: 32); P297V (SEQ ID NO: 34); P297R (SEQ ID NO: 36); P297F (SEQ ID NO: 38); D303R (SEQ ID NO: 40); D303C (SEQ ID NO: 42); E305K (SEQ ID NO: 44); Y307K (SEQ ID NO: 46); Q353R (SEQ ID NO: 48); L444W (SEQ ID NO: 50); F465R (SEQ ID NO: 52); S469K (SEQ ID NO: 54); V470K (SEQ ID NO: 56); 1498K (SEQ ID NO: 58); Y507W (SEQ ID NO: 60); Y507S (SEQ ID NO: 62); Y507R (SEQ ID NO: 64); Q510Y (SEQ ID NO: 66); Q510V (SEQ ID NO: 68); Q510K (SEQ ID NO: 70); P512V (SEQ ID NO: 72); P512G (SEQ ID NO: 74); Y513S (SEQ ID NO: 76); Y513R (SEQ ID NO: 78); Y513L (SEQ ID NO: 80); Y513G (SEQ ID NO: 82); S514R (SEQ ID NO: 84); S514P (SEQ ID NO: 86); T515P (SEQ ID NO: 88); K516R (SEQ ID NO: 90); K516P (SEQ ID NO: 92); K517P (SEQ ID NO: 94); 1518P (SEQ ID NO: 96); L520M (SEQ ID NO: 98); F522A (SEQ ID NO: 100); A541V (SEQ ID NO: 102); G553M (SEQ ID NO: 104); N556R (SEQ ID NO: 106); N556E (SEQ ID NO: 108); D562V (SEQ ID NO: 110); D562K (SEQ ID NO: 112); D5621 (SEQ ID NO: 114); N583V (SEQ ID NO: 116); L585K (SEQ ID NO: 118); F653R (SEQ ID NO: 120); K712R (SEQ ID NO: 122); N716R (SEQ ID NO: 124); E731P (SEQ ID NO: 126); N732T (SEQ ID NO: 128); A744T (SEQ ID NO: 130); A744P (SEQ ID NO: 132); A744N (SEQ ID NO: 134); F748A (SEQ ID NO: 136); S751A (SEQ ID NO: 138); K754G (SEQ ID NO: 140); 1757W (SEQ ID NO: 142); 1757K (SEQ ID NO: 144); E771R (SEQ ID NO: 146); N787A (SEQ ID NO: 148); A825R (SEQ ID NO: 150); T826K (SEQ ID NO: 152); T826F (SEQ ID NO: 154); Y832R (SEQ ID NO: 156); Y836Q (SEQ ID NO: 158); Y836K (SEQ ID NO: 160); Y839L (SEQ ID NO: 162); F840L (SEQ ID NO: 164); Y907V (SEQ ID NO: 166); Y9071 (SEQ ID NO: 168); Q916Y (SEQ ID NO: 170); E935R (SEQ ID NO: 172); 1936R (SEQ ID NO: 174); K974G (SEQ ID NO: 176); K1019V (SEQ ID NO: 178); 135L/S469K (SEQ ID NO: 180); 135L/T826F (SEQ ID NO: 182); 140Q/S469K (SEQ ID NO: 184); 140Q/T826F (SEQ ID NO: 186); S469K/K516P (SEQ ID NO: 188); S469K/T826F (SEQ ID NO: 190); Y513G/Y832R (SEQ ID NO: 192); Y513G/F840L (SEQ ID NO: 194); 135L/S469K/T826F (SEQ ID NO: 196); 140Q/S469K/T826F (SEQ ID NO: 198); S469K/K516P/T826F (SEQ ID NO: 200); S469K/T826F/F840L (SEQ ID NO: 202); D303R/S469K/T826F/F840L (SEQ ID NO: 204); F465R/S469K/T826F/F840L (SEQ ID NO: 206); D303R/F465R/S469K/T826F/F840L (SEQ ID NO: 208); or D303R/S469K/K516P/T826F/F840L (SEQ ID NO: 210). In another aspect, the ERCAS12A mutant poly nucleotide is selected from Q18V (SEQ ID NO: 3); 135L (SEQ ID NO: 5); G39Q (SEQ ID NO: 7); G39K (SEQ ID NO: 9); 140Q (SEQ ID NO: 11); D56R (SEQ ID NO: 13); D56P (SEQ ID NO: 15); D59R (SEQ ID NO: 17); D59A (SEQ ID NO: 19); S158G (SEQ ID NO: 21); K165Y (SEQ ID NO: 23); S181V (SEQ ID NO: 25); A290K (SEQ ID NO: 27); D291N (SEQ ID NO: 29); V296R (SEQ ID NO: 31); P297V (SEQ ID NO: 33); P297R (SEQ ID NO: 35); P297F (SEQ ID NO: 37); D303R (SEQ ID NO: 39); D303C (SEQ ID NO: 41); E305K (SEQ ID NO: 43); Y307K (SEQ ID NO: 45); Q353R (SEQ ID NO: 47); L444W (SEQ ID NO: 49); F465R (SEQ ID NO: 51); S469K (SEQ ID NO: 53); V470K (SEQ ID NO: 55); 1498K (SEQ ID NO: 57); Y507W (SEQ ID NO: 59); Y507S (SEQ ID NO: 61); Y507R (SEQ ID NO: 63); Q510Y (SEQ ID NO: 65); Q510V (SEQ ID NO: 67); Q51OK (SEQ ID NO: 69); P512V (SEQ ID NO: 71); P512G (SEQ ID NO: 73); Y513S (SEQ ID NO: 75); Y513R (SEQ ID NO: 77); Y513L (SEQ ID NO: 79); Y513G (SEQ ID NO: 81); S514R (SEQ ID NO: 83); S514P (SEQ ID NO: 85); T515P (SEQ ID NO: 87); K516R (SEQ ID NO: 89); K516P (SEQ ID NO: 91); K517P (SEQ ID NO: 93); 1518P (SEQ ID NO: 95); L520M (SEQ ID NO: 97); F522A (SEQ ID NO: 99); A541V (SEQ ID NO: 101); G553M (SEQ ID NO: 103); N556R (SEQ ID NO: 105); N556E (SEQ ID NO: 107); D562V (SEQ ID NO: 109); D562K (SEQ ID NO: 111); D5621 (SEQ ID NO: 113); N583V (SEQ ID NO: 115); L585K (SEQ ID NO: 117); F653R (SEQ ID NO: 119); K712R (SEQ ID NO: 121); N716R (SEQ ID NO: 123); E731P (SEQ ID NO: 125); N732T (SEQ ID NO: 127); A744T (SEQ ID NO: 129); A744P (SEQ ID NO: 131); A744N (SEQ ID NO: 132); F748A (SEQ ID NO: 135); S751A (SEQ ID NO: 137); K754G (SEQ ID NO: 139); 1757W (SEQ ID NO: 141); 1757K (SEQ ID NO: 143); E771R (SEQ ID NO: 145); N787A (SEQ ID NO: 147); A825R (SEQ ID NO: 149); T826K (SEQ ID NO: 151); T826F (SEQ ID NO: 153); Y832R (SEQ ID NO: 155); Y836Q (SEQ ID NO: 157); Y836K (SEQ ID NO: 159); Y839L (SEQ ID NO: 161); F840L (SEQ ID NO: 163); Y907V (SEQ ID NO: 165); Y9071 (SEQ ID NO: 167); Q916Y (SEQ ID NO: 169); E935R (SEQ ID NO: 171); 1936R (SEQ ID NO: 173); K974G (SEQ ID NO: 175); K1019V (SEQ ID NO: 177); 135L/S469K (SEQ ID NO: 179); 135L/T826F (SEQ ID NO: 181); 140Q/S469K (SEQ ID NO: 183); 140Q/T826F (SEQ ID NO: 185); S469K/K516P (SEQ ID NO: 187); S469K/T826F (SEQ ID NO: 189); Y513G/Y832R (SEQ ID NO: 191); Y513G/F840L (SEQ ID NO: 193); 135L/S469K/T826F (SEQ ID NO: 195); 140Q/S469K/T826F (SEQ ID NO: 197); S469K/K516P/T826F (SEQ ID NO: 199); S469K/T826F/F840L (SEQ ID NO: 201); D303R/S469K/T826F/F840L (SEQ ID NO: 203); F465R/S469K/T826F/F840L (SEQ ID NO: 205); D303R/F465R/S469K/T826F/F840L (SEQ ID NO: 207); or D303R/S469K/K516P/T826F/F840L (SEQ ID NO: 209). In another aspect, the ERCAS12A mutant polynucleotide is selected from is selected from: D303R/S469K/T826F/F840L (SEQ ID NO: 203); F465R/S469K/T826F/F840L (SEQ ID NO: 205); D303R/F465R/S469K/T826F/F840L (SEQ ID NO: 207); or D303R/S469K/K516P/T826F/F840L (SEQ ID NO: 209).

[0009] Another embodiment described herein is a vector or plasmid comprising the polynucleotide sequences described herein.

[0010] Another embodiment described herein is a cell comprising a nucleic acid comprising one or more of the polynucleotide sequences described herein.

[0011] Another embodiment described herein is an isolated CRISPR ribonucleoprotein complex comprising a guide RNA and a ERCAS12A mutant polypeptide having one or more amino acid substitutions introduced into a wild-type ERCAS12A polypeptide sequence of SEQ ID NO: 2, where the ERCAS12A mutant provides improved gene editing as compared to the wild-type ERCAS12A polypeptide. In one aspect, the ERCAS12A mutant has a polypeptide sequence selected from the even numbered sequences of SEQ ID NO: 4-210. In another aspect, the ERCAS12A mutant comprises one or more amino acid substitution at positions 18, 35, 39, 39, 40, 56, 56, 59, 59, 158, 165, 181, 290, 291, 296, 297, 297, 297, 303, 303, 305, 307, 353, 444, 465, 469, 470, 498, 507, 507, 507, 510, 510, 510, 512, 512, 513, 513, 513, 513, 514, 514, 515, 516, 516, 517, 518, 520, 522, 541, 553, 556, 556, 562, 562, 562, 583, 585, 653, 712, 716, 731, 732, 744, 744, 744, 748, 751, 754, 757, 757, 771, 787, 825, 826, 826, 832, 836, 836, 839, 840, 907, 907, 916, 935, 936, 974, or 1019 of the wild-type ERCAS12A polypeptide sequence of SEQ ID NO: 2. In another aspect, the ERCAS12A mutant comprises one or more amino acid substitutions selected from Q18V, 135L, G39K, G39Q, 140Q, D56P, D56R, D59A, D59R, S158G, K165Y, S181V, A290K, D291N, V296R, P297F, P297R, P297V, D303C, D303R, E305K, Y307K, Q353R, L444W, F465R, S469K, V470K, 1498K, Y507R, Y507S, Y507W, Q510K, Q510V, Q510Y, P512G, P512V, Y513G, Y513L, Y513R, Y513S, S514P, S514R, T515P, K516P, K516R, K517P, 1518P, L520M, F522A, A541V, G553M, N556E, N556R, D5621, D562K, D562V, N583V, L585K, F653R, K712R, N716R, E731P, N732T, A744N, A744P, A744T, F748A, S751A, K754G, 1757K, 1757W, E771R, N787A, A825R, T826F, T826K, Y832R, Y836K, Y836Q, Y839L, F840L, Y9071, Y907V, Q916Y, E935R, 1936R, K974G, K1019V, or combinations thereof of the wild-type ERCAS12A polypeptide sequence of SEQ ID NO: 2. In another aspect, the ERCAS12A mutant is selected from: Q18V (SEQ ID NO: 4); 135L (SEQ ID NO: 6); G39Q (SEQ ID NO: 8); G39K (SEQ ID NO: 10); 140Q (SEQ ID NO: 12); D56R (SEQ ID NO: 14); D56P (SEQ ID NO: 16); D59R (SEQ ID NO: 18); D59A (SEQ ID NO: 20); S158G (SEQ ID NO: 22); K165Y (SEQ ID NO: 24); S181V (SEQ ID NO: 26); A290K (SEQ ID NO: 28); D291N (SEQ ID NO: 30); V296R (SEQ ID NO: 32); P297V (SEQ ID NO: 34); P297R (SEQ ID NO: 36); P297F (SEQ ID NO: 38); D303R (SEQ ID NO: 40); D303C (SEQ ID NO: 42); E305K (SEQ ID NO: 44); Y307K (SEQ ID NO: 46); Q353R (SEQ ID NO: 48); L444W (SEQ ID NO: 50); F465R (SEQ ID NO: 52); S469K (SEQ ID NO: 54); V470K (SEQ ID NO: 56); 1498K (SEQ ID NO: 58); Y507W (SEQ ID NO: 60); Y507S (SEQ ID NO: 62); Y507R (SEQ ID NO: 64); Q510Y (SEQ ID NO: 66); Q510V (SEQ ID NO: 68); Q510K (SEQ ID NO: 70); P512V (SEQ ID NO: 72); P512G (SEQ ID NO: 74); Y513S (SEQ ID NO: 76); Y513R (SEQ ID NO: 78); Y513L (SEQ ID NO: 80); Y513G (SEQ ID NO: 82); S514R (SEQ ID NO: 84); S514P (SEQ ID NO: 86); T515P (SEQ ID NO: 88); K516R (SEQ ID NO: 90); K516P (SEQ ID NO: 92); K517P (SEQ ID NO: 94); 1518P (SEQ ID NO: 96); L520M (SEQ ID NO: 98); F522A (SEQ ID NO: 100); A541V (SEQ ID NO: 102); G553M (SEQ ID NO: 104); N556R (SEQ ID NO: 106); N556E (SEQ ID NO: 108); D562V (SEQ ID NO: 110); D562K (SEQ ID NO: 112); D5621 (SEQ ID NO: 114); N583V (SEQ ID NO: 116); L585K (SEQ ID NO: 118); F653R (SEQ ID NO: 120); K712R (SEQ ID NO: 122); N716R (SEQ ID NO: 124); E731P (SEQ ID NO: 126); N732T (SEQ ID NO: 128); A744T (SEQ ID NO: 130); A744P (SEQ ID NO: 132); A744N (SEQ ID NO: 134); F748A (SEQ ID NO: 136); S751A (SEQ ID NO: 138); K754G (SEQ ID NO: 140); 1757W (SEQ ID NO: 142); 1757K (SEQ ID NO: 144); E771R (SEQ ID NO: 146); N787A (SEQ ID NO: 148); A825R (SEQ ID NO: 150); T826K (SEQ ID NO: 152); T826F (SEQ ID NO: 154); Y832R (SEQ ID NO: 156); Y836Q (SEQ ID NO: 158); Y836K (SEQ ID NO: 160); Y839L (SEQ ID NO: 162); F840L (SEQ ID NO: 164); Y907V (SEQ ID NO: 166); Y9071 (SEQ ID NO: 168); Q916Y (SEQ ID NO: 170); E935R (SEQ ID NO: 172); 1936R (SEQ ID NO: 174); K974G (SEQ ID NO: 176); K1019V (SEQ ID NO: 178); 135L/S469K (SEQ ID NO: 180); 135L/T826F (SEQ ID NO: 182); 140Q/S469K (SEQ ID NO: 184); 140Q/T826F (SEQ ID NO: 186); S469K/K516P (SEQ ID NO: 188); S469K/T826F (SEQ ID NO: 190); Y513G/Y832R (SEQ ID NO: 192); Y513G/F840L (SEQ ID NO: 194); 135L/S469K/T826F (SEQ ID NO: 196); 140Q/S469K/T826F (SEQ ID NO: 198); S469K/K516P/T826F (SEQ ID NO: 200); S469K/T826F/F840L (SEQ ID NO: 202); D303R/S469K/T826F/F840L (SEQ ID NO: 204); F465R/S469K/T826F/F840L (SEQ ID NO: 206); D303R/F465R/S469K/T826F/F840L (SEQ ID NO: 208); or D303R/S469K/K516P/T826F/F840L (SEQ ID NO: 210). In another aspect, the ERCAS12A mutant is selected from D303R/S469K/T826F/F840L (SEQ ID NO: 204); F465R/S469K/T826F/F840L (SEQ ID NO: 206); D303R/F465R/S469K/T826F/F840L (SEQ ID NO: 208); or D303R/S469K/K516P/T826F/F840L (SEQ ID NO: 210).

[0012] Another embodiment described herein is an isolated CRISPR/Cpf1 endonuclease system comprising a crRNA and a ERCAS12A mutant polypeptide having one or more amino acid substitutions introduced into a wild-type ERCAS12A polypeptide sequence of SEQ ID NO: 2 where the ERCAS12A mutant polypeptide provides improved genome editing as compared to the wild-type ERCAS12A polypeptide. In one aspect, the ERCAS12A mutant has a polypeptide sequence selected from the even numbered sequences of SEQ ID NO: 4-210. In another aspect, the ERCAS12A mutant comprises one or more amino acid substitution at positions 18, 35, 39, 39, 40, 56, 56, 59, 59, 158, 165, 181, 290, 291, 296, 297, 297, 297, 303, 303, 305, 307, 353, 444, 465, 469, 470, 498, 507, 507, 507, 510, 510, 510, 512, 512, 513, 513, 513, 513, 514, 514, 515, 516, 516, 517, 518, 520, 522, 541, 553, 556, 556, 562, 562, 562, 583, 585, 653, 712, 716, 731, 732, 744, 744, 744, 748, 751, 754, 757, 757, 771, 787, 825, 826, 826, 832, 836, 836, 839, 840, 907, 907, 916, 935, 936, 974, or 1019 of the wild-type ERCAS12A polypeptide sequence of SEQ ID NO: 2. In another aspect, the ERCAS12A mutant comprises one or more amino acid substitutions selected from Q18V, 135L, G39K, G39Q, 140Q, D56P, D56R, D59A, D59R, S158G, K165Y, S181V, A290K, D291N, V296R, P297F, P297R, P297V, D303C, D303R, E305K, Y307K, Q353R, L444W, F465R, S469K, V470K, 1498K, Y507R, Y507S, Y507W, Q510K, Q510V, Q510Y, P512G, P512V, Y513G, Y513L, Y513R, Y513S, S514P, S514R, T515P, K516P, K516R, K517P, 1518P, L520M, F522A, A541V, G553M, N556E, N556R, D5621, D562K, D562V, N583V, L585K, F653R, K712R, N716R, E731P, N732T, A744N, A744P, A744T, F748A, S751A, K754G, 1757K, 1757W, E771R, N787A, A825R, T826F, T826K, Y832R, Y836K, Y836Q, Y839L, F840L, Y9071, Y907V, Q916Y, E935R, 1936R, K974G, K1019V, or combinations thereof of the wild-type ERCAS12A polypeptide sequence of SEQ ID NO: 2. In another aspect, the ERCAS12A mutant is selected from: Q18V (SEQ ID NO: 4); 135L (SEQ ID NO: 6); G39Q (SEQ ID NO: 8); G39K (SEQ ID NO: 10); 140Q (SEQ ID NO: 12); D56R (SEQ ID NO: 14); D56P (SEQ ID NO: 16); D59R (SEQ ID NO: 18); D59A (SEQ ID NO: 20); S158G (SEQ ID NO: 22); K165Y (SEQ ID NO: 24); S181V (SEQ ID NO: 26); A290K (SEQ ID NO: 28); D291N (SEQ ID NO: 30); V296R (SEQ ID NO: 32); P297V (SEQ ID NO: 34); P297R (SEQ ID NO: 36); P297F (SEQ ID NO: 38); D303R (SEQ ID NO: 40); D303C (SEQ ID NO: 42); E305K (SEQ ID NO: 44); Y307K (SEQ ID NO: 46); Q353R (SEQ ID NO: 48); L444W (SEQ ID NO: 50); F465R (SEQ ID NO: 52); S469K (SEQ ID NO: 54); V470K (SEQ ID NO: 56); 1498K (SEQ ID NO: 58); Y507W (SEQ ID NO: 60); Y507S (SEQ ID NO: 62); Y507R (SEQ ID NO: 64); Q510Y (SEQ ID NO: 66); Q510V (SEQ ID NO: 68); Q510K (SEQ ID NO: 70); P512V (SEQ ID NO: 72); P512G (SEQ ID NO: 74); Y513S (SEQ ID NO: 76); Y513R (SEQ ID NO: 78); Y513L (SEQ ID NO: 80); Y513G (SEQ ID NO: 82); S514R (SEQ ID NO: 84); S514P (SEQ ID NO: 86); T515P (SEQ ID NO: 88); K516R (SEQ ID NO: 90); K516P (SEQ ID NO: 92); K517P (SEQ ID NO: 94); 1518P (SEQ ID NO: 96); L520M (SEQ ID NO: 98); F522A (SEQ ID NO: 100); A541V (SEQ ID NO: 102); G553M (SEQ ID NO: 104); N556R (SEQ ID NO: 106); N556E (SEQ ID NO: 108); D562V (SEQ ID NO: 110); D562K (SEQ ID NO: 112); D5621 (SEQ ID NO: 114); N583V (SEQ ID NO: 116); L585K (SEQ ID NO: 118); F653R (SEQ ID NO: 120); K712R (SEQ ID NO: 122); N716R (SEQ ID NO: 124); E731P (SEQ ID NO: 126); N732T (SEQ ID NO: 128); A744T (SEQ ID NO: 130); A744P (SEQ ID NO: 132); A744N (SEQ ID NO: 134); F748A (SEQ ID NO: 136); S751A (SEQ ID NO: 138); K754G (SEQ ID NO: 140); 1757W (SEQ ID NO: 142); 1757K (SEQ ID NO: 144); E771R (SEQ ID NO: 146); N787A (SEQ ID NO: 148); A825R (SEQ ID NO: 150); T826K (SEQ ID NO: 152); T826F (SEQ ID NO: 154); Y832R (SEQ ID NO: 156); Y836Q (SEQ ID NO: 158); Y836K (SEQ ID NO: 160); Y839L (SEQ ID NO: 162); F840L (SEQ ID NO: 164); Y907V (SEQ ID NO: 166); Y9071 (SEQ ID NO: 168); Q916Y (SEQ ID NO: 170); E935R (SEQ ID NO: 172); 1936R (SEQ ID NO: 174); K974G (SEQ ID NO: 176); K1019V (SEQ ID NO: 178); 135L/S469K (SEQ ID NO: 180); 135L/T826F (SEQ ID NO: 182); 140Q/S469K (SEQ ID NO: 184); 140Q/T826F (SEQ ID NO: 186); S469K/K516P (SEQ ID NO: 188); S469K/T826F (SEQ ID NO: 190); Y513G/Y832R (SEQ ID NO: 192); Y513G/F840L (SEQ ID NO: 194); 135L/S469K/T826F (SEQ ID NO: 196); 140Q/S469K/T826F (SEQ ID NO: 198); S469K/K516P/T826F (SEQ ID NO: 200); S469K/T826F/F840L (SEQ ID NO: 202); D303R/S469K/T826F/F840L (SEQ ID NO: 204); F465R/S469K/T826F/F840L (SEQ ID NO: 206); D303R/F465R/S469K/T826F/F840L (SEQ ID NO: 208); or D303R/S469K/K516P/T826F/F840L (SEQ ID NO: 210). In another aspect, the ERCAS12A mutant is selected from D303R/S469K/T826F/F840L (SEQ ID NO: 204); F465R/S469K/T826F/F840L (SEQ ID NO: 206); D303R/F465R/S469K/T826F/F840L (SEQ ID NO: 208); or D303R/S469K/K516P/T826F/F840L (SEQ ID NO: 210).

[0013] Another embodiment described herein is a method for performing gene editing comprising: contacting a candidate editing target site locus with a CRISPR ribonucleoprotein complex comprising a crRNA and an ERCAS12A mutant polypeptide comprising having one or more amino acid substitutions introduced into a wild-type ERCAS12A polypeptide sequence of SEQ ID NO: 2, where the ERCAS12A mutant provides an improvement in gene editing as compared to the wild-type ERCAS12A polypeptide. In one aspect, the ERCAS12A mutant has a polypeptide sequence selected from the even numbered sequences of SEQ ID NO: 4-210. In another aspect, the ERCAS12A mutant comprises ERCAS12A mutant comprises one or more amino acid substitution at positions 18, 35, 39, 39, 40, 56, 56, 59, 59, 158, 165, 181, 290, 291, 296, 297, 297, 297, 303, 303, 305, 307, 353, 444, 465, 469, 470, 498, 507, 507, 507, 510, 510, 510, 512, 512, 513, 513, 513, 513, 514, 514, 515, 516, 516, 517, 518, 520, 522, 541, 553, 556, 556, 562, 562, 562, 583, 585, 653, 712, 716, 731, 732, 744, 744, 744, 748, 751, 754, 757, 757, 771, 787, 825, 826, 826, 832, 836, 836, 839, 840, 907, 907, 916, 935, 936, 974, or 1019 of the wild-type ERCAS12A polypeptide sequence of SEQ ID NO: 2. In another aspect, ERCAS12A mutant comprises one or more amino acid substitutions selected from Q18V, 135L, G39K, G39Q, 140Q, D56P, D56R, D59A, D59R, S158G, K165Y, S181V, A290K, D291N, V296R, P297F, P297R, P297V, D303C, D303R, E305K, Y307K, Q353R, L444W, F465R, S469K, V470K, 1498K, Y507R, Y507S, Y507W, Q510K, Q510V, Q510Y, P512G, P512V, Y513G, Y513L, Y513R, Y513S, S514P, S514R, T515P, K516P, K516R, K517P, 1518P, L520M, F522A, A541V, G553M, N556E, N556R, D5621, D562K, D562V, N583V, L585K, F653R, K712R, N716R, E731P, N732T, A744N, A744P, A744T, F748A, S751A, K754G, 1757K, 1757W, E771R, N787A, A825R, T826F, T826K, Y832R, Y836K, Y836Q, Y839L, F840L, Y9071, Y907V, Q916Y, E935R, 1936R, K974G, K1019V, or combinations thereof of the wild-type ERCAS12A polypeptide sequence of SEQ ID NO: 2. In another aspect, the ERCAS12A mutant is selected from: Q18V (SEQ ID NO: 4); 135L (SEQ ID NO: 6); G39Q (SEQ ID NO: 8); G39K (SEQ ID NO: 10); 140Q (SEQ ID NO: 12); D56R (SEQ ID NO: 14); D56P (SEQ ID NO: 16); D59R (SEQ ID NO: 18); D59A (SEQ ID NO: 20); S158G (SEQ ID NO: 22); K165Y (SEQ ID NO: 24); S181V (SEQ ID NO: 26); A290K (SEQ ID NO: 28); D291N (SEQ ID NO: 30); V296R (SEQ ID NO: 32); P297V (SEQ ID NO: 34); P297R (SEQ ID NO: 36); P297F (SEQ ID NO: 38); D303R (SEQ ID NO: 40); D303C (SEQ ID NO: 42); E305K (SEQ ID NO: 44); Y307K (SEQ ID NO: 46); Q353R (SEQ ID NO: 48); L444W (SEQ ID NO: 50); F465R (SEQ ID NO: 52); S469K (SEQ ID NO: 54); V470K (SEQ ID NO: 56); 1498K (SEQ ID NO: 58); Y507W (SEQ ID NO: 60); Y507S (SEQ ID NO: 62); Y507R (SEQ ID NO: 64); Q510Y (SEQ ID NO: 66); Q510V (SEQ ID NO: 68); Q510K (SEQ ID NO: 70); P512V (SEQ ID NO: 72); P512G (SEQ ID NO: 74); Y513S (SEQ ID NO: 76); Y513R (SEQ ID NO: 78); Y513L (SEQ ID NO: 80); Y513G (SEQ ID NO: 82); S514R (SEQ ID NO: 84); S514P (SEQ ID NO: 86); T515P (SEQ ID NO: 88); K516R (SEQ ID NO: 90); K516P (SEQ ID NO: 92); K517P (SEQ ID NO: 94); 1518P (SEQ ID NO: 96); L520M (SEQ ID NO: 98); F522A (SEQ ID NO: 100); A541V (SEQ ID NO: 102); G553M (SEQ ID NO: 104); N556R (SEQ ID NO: 106); N556E (SEQ ID NO: 108); D562V (SEQ ID NO: 110); D562K (SEQ ID NO: 112); D5621 (SEQ ID NO: 114); N583V (SEQ ID NO: 116); L585K (SEQ ID NO: 118); F653R (SEQ ID NO: 120); K712R (SEQ ID NO: 122); N716R (SEQ ID NO: 124); E731P (SEQ ID NO: 126); N732T (SEQ ID NO: 128); A744T (SEQ ID NO: 130); A744P (SEQ ID NO: 132); A744N (SEQ ID NO: 134); F748A (SEQ ID NO: 136); S751A (SEQ ID NO: 138); K754G (SEQ ID NO: 140); 1757W (SEQ ID NO: 142); 1757K (SEQ ID NO: 144); E771R (SEQ ID NO: 146); N787A (SEQ ID NO: 148); A825R (SEQ ID NO: 150); T826K (SEQ ID NO: 152); T826F (SEQ ID NO: 154); Y832R (SEQ ID NO: 156); Y836Q (SEQ ID NO: 158); Y836K (SEQ ID NO: 160); Y839L (SEQ ID NO: 162); F840L (SEQ ID NO: 164); Y907V (SEQ ID NO: 166); Y9071 (SEQ ID NO: 168); Q916Y (SEQ ID NO: 170); E935R (SEQ ID NO: 172); 1936R (SEQ ID NO: 174); K974G (SEQ ID NO: 176); K1019V (SEQ ID NO: 178); 135L/S469K (SEQ ID NO: 180); 135L/T826F (SEQ ID NO: 182); 140Q/S469K (SEQ ID NO: 184); 140Q/T826F (SEQ ID NO: 186); S469K/K516P (SEQ ID NO: 188); S469K/T826F (SEQ ID NO: 190); Y513G/Y832R (SEQ ID NO: 192); Y513G/F840L (SEQ ID NO: 194); 135L/S469K/T826F (SEQ ID NO: 196); 140Q/S469K/T826F (SEQ ID NO: 198); S469K/K516P/T826F (SEQ ID NO: 200); S469K/T826F/F840L (SEQ ID NO: 202); D303R/S469K/T826F/F840L (SEQ ID NO: 204); F465R/S469K/T826F/F840L (SEQ ID NO: 206); D303R/F465R/S469K/T826F/F840L (SEQ ID NO: 208); or D303R/S469K/K516P/T826F/F840L (SEQ ID NO: 210). In another aspect, the ERCAS12A mutant is selected from D303R/S469K/T826F/F840L (SEQ ID NO: 204); F465R/S469K/T826F/F840L (SEQ ID NO: 206); D303R/F465R/S469K/T826F/F840L (SEQ ID NO: 208); or D303R/S469K/K516P/T826F/F840L (SEQ ID NO: 210).

[0014] Another embodiment described herein is a kit comprising a CRISPR ribonucleoprotein complex comprising a guide RNA and an ERCAS12A mutant polypeptide comprising one or more amino acid substitutions introduced into a wild-type ERCAS12A polypeptide sequence of SEQ ID NO: 2, where the ERCAS12A mutant polypeptide provides improved gene editing as compared to the wild-type ERCAS12A polypeptide. In one aspect, the ERCAS12A mutant has a polypeptide sequence selected from the even numbered sequences of SEQ ID NO: 4-210. In another aspect, the ERCAS12A mutant comprises wherein the ERCAS12A mutant comprises one or more amino acid substitutions selected from Q18V, 135L, G39K, G39Q, 140Q, D56P, D56R, D59A, D59R, S158G, K165Y, S181V, A290K, D291N, V296R, P297F, P297R, P297V, D303C, D303R, E305K, Y307K, Q353R, L444W, F465R, S469K, V470K, 1498K, Y507R, Y507S, Y507W, Q51OK, Q510V, Q510Y, P512G, P512V, Y513G, Y513L, Y513R, Y513S, S514P, S514R, T515P, K516P, K516R, K517P, 1518P, L520M, F522A, A541V, G553M, N556E, N556R, D5621, D562K, D562V, N583V, L585K, F653R, K712R, N716R, E731P, N732T, A744N, A744P, A744T, F748A, S751A, K754G, 1757K, 1757W, E771R, N787A, A825R, T826F, T826K, Y832R, Y836K, Y836Q, Y839L, F840L, Y9071, Y907V, Q916Y, E935R, 1936R, K974G, K1019V, or combinations thereof of the wild-type ERCAS12A polypeptide sequence of SEQ ID NO: 2. In another aspect, the ERCAS12A mutant is selected from: Q18V (SEQ ID NO: 4); 135L (SEQ ID NO: 6); G39Q (SEQ ID NO: 8); G39K (SEQ ID NO: 10); 140Q (SEQ ID NO: 12); D56R (SEQ ID NO: 14); D56P (SEQ ID NO: 16); D59R (SEQ ID NO: 18); D59A (SEQ ID NO: 20); S158G (SEQ ID NO: 22); K165Y (SEQ ID NO: 24); S181V (SEQ ID NO: 26); A290K (SEQ ID NO: 28); D291N (SEQ ID NO: 30); V296R (SEQ ID NO: 32); P297V (SEQ ID NO: 34); P297R (SEQ ID NO: 36); P297F (SEQ ID NO: 38); D303R (SEQ ID NO: 40); D303C (SEQ ID NO: 42); E305K (SEQ ID NO: 44); Y307K (SEQ ID NO: 46); Q353R (SEQ ID NO: 48); L444W (SEQ ID NO: 50); F465R (SEQ ID NO: 52); S469K (SEQ ID NO: 54); V470K (SEQ ID NO: 56); 1498K (SEQ ID NO: 58); Y507W (SEQ ID NO: 60); Y507S (SEQ ID NO: 62); Y507R (SEQ ID NO: 64); Q510Y (SEQ ID NO: 66); Q510V (SEQ ID NO: 68); Q510K (SEQ ID NO: 70); P512V (SEQ ID NO: 72); P512G (SEQ ID NO: 74); Y513S (SEQ ID NO: 76); Y513R (SEQ ID NO: 78); Y513L (SEQ ID NO: 80); Y513G (SEQ ID NO: 82); S514R (SEQ ID NO: 84); S514P (SEQ ID NO: 86); T515P (SEQ ID NO: 88); K516R (SEQ ID NO: 90); K516P (SEQ ID NO: 92); K517P (SEQ ID NO: 94); 1518P (SEQ ID NO: 96); L520M (SEQ ID NO: 98); F522A (SEQ ID NO: 100); A541V (SEQ ID NO: 102); G553M (SEQ ID NO: 104); N556R (SEQ ID NO: 106); N556E (SEQ ID NO: 108); D562V (SEQ ID NO: 110); D562K (SEQ ID NO: 112); D5621 (SEQ ID NO: 114); N583V (SEQ ID NO: 116); L585K (SEQ ID NO: 118); F653R (SEQ ID NO: 120); K712R (SEQ ID NO: 122); N716R (SEQ ID NO: 124); E731P (SEQ ID NO: 126); N732T (SEQ ID NO: 128); A744T (SEQ ID NO: 130); A744P (SEQ ID NO: 132); A744N (SEQ ID NO: 134); F748A (SEQ ID NO: 136); S751A (SEQ ID NO: 138); K754G (SEQ ID NO: 140); 1757W (SEQ ID NO: 142); 1757K (SEQ ID NO: 144); E771R (SEQ ID NO: 146); N787A (SEQ ID NO: 148); A825R (SEQ ID NO: 150); T826K (SEQ ID NO: 152); T826F (SEQ ID NO: 154); Y832R (SEQ ID NO: 156); Y836Q (SEQ ID NO: 158); Y836K (SEQ ID NO: 160); Y839L (SEQ ID NO: 162); F840L (SEQ ID NO: 164); Y907V (SEQ ID NO: 166); Y9071 (SEQ ID NO: 168); Q916Y (SEQ ID NO: 170); E935R (SEQ ID NO: 172); 1936R (SEQ ID NO: 174); K974G (SEQ ID NO: 176); K1019V (SEQ ID NO: 178); 135L/S469K (SEQ ID NO: 180); 135L/T826F (SEQ ID NO: 182); 140Q/S469K (SEQ ID NO: 184); 140Q/T826F (SEQ ID NO: 186); S469K/K516P (SEQ ID NO: 188); S469K/T826F (SEQ ID NO: 190); Y513G/Y832R (SEQ ID NO: 192); Y513G/F840L (SEQ ID NO: 194); 135L/S469K/T826F (SEQ ID NO: 196); 140Q/S469K/T826F (SEQ ID NO: 198); S469K/K516P/T826F (SEQ ID NO: 200); S469K/T826F/F840L (SEQ ID NO: 202); D303R/S469K/T826F/F840L (SEQ ID NO: 204); F465R/S469K/T826F/F840L (SEQ ID NO: 206); D303R/F465R/S469K/T826F/F840L (SEQ ID NO: 208); or D303R/S469K/K516P/T826F/F840L (SEQ ID NO: 210). In another aspect, the ERCAS12A mutant is selected from D303R/S469K/T826F/F840L (SEQ ID NO: 204); F465R/S469K/T826F/F840L (SEQ ID NO: 206); D303R/F465R/S469K/T826F/F840L (SEQ ID NO: 208); or D303R/S469K/K516P/T826F/F840L (SEQ ID NO: 210).

[0015] Another embodiment described herein is the use of a ERCAS12A mutant polypeptide for improving CRISPR/LbCas12a-associated nuclease activity at non-canonical TTTT PAM sites, wherein the ERCAS12A mutant one or more amino acid substitutions introduced into a wild-type ERCAS12A polypeptide sequence of SEQ ID NO: 2, where the ERCAS12A mutant provides improved gene editing as compared to the wild-type ERCAS12A polypeptide. In one aspect, the ERCAS12A mutant has a polypeptide sequence selected from the even numbered sequences of SEQ ID NO: 4-210. In another aspect, the ERCAS12A mutant is selected from: Q18V (SEQ ID NO: 4); 135L (SEQ ID NO: 6); G39Q (SEQ ID NO: 8); G39K (SEQ ID NO: 10); 140Q (SEQ ID NO: 12); D56R (SEQ ID NO: 14); D56P (SEQ ID NO: 16); D59R (SEQ ID NO: 18); D59A (SEQ ID NO: 20); S158G (SEQ ID NO: 22); K165Y (SEQ ID NO: 24); S181V (SEQ ID NO: 26); A290K (SEQ ID NO: 28); D291N (SEQ ID NO: 30); V296R (SEQ ID NO: 32); P297V (SEQ ID NO: 34); P297R (SEQ ID NO: 36); P297F (SEQ ID NO: 38); D303R (SEQ ID NO: 40); D303C (SEQ ID NO: 42); E305K (SEQ ID NO: 44); Y307K (SEQ ID NO: 46); Q353R (SEQ ID NO: 48); L444W (SEQ ID NO: 50); F465R (SEQ ID NO: 52); S469K (SEQ ID NO: 54); V470K (SEQ ID NO: 56); 1498K (SEQ ID NO: 58); Y507W (SEQ ID NO: 60); Y507S (SEQ ID NO: 62); Y507R (SEQ ID NO: 64); Q510Y (SEQ ID NO: 66); Q510V (SEQ ID NO: 68); Q51OK (SEQ ID NO: 70); P512V (SEQ ID NO: 72); P512G (SEQ ID NO: 74); Y513S (SEQ ID NO: 76); Y513R (SEQ ID NO: 78); Y513L (SEQ ID NO: 80); Y513G (SEQ ID NO: 82); S514R (SEQ ID NO: 84); S514P (SEQ ID NO: 86); T515P (SEQ ID NO: 88); K516R (SEQ ID NO: 90); K516P (SEQ ID NO: 92); K517P (SEQ ID NO: 94); 1518P (SEQ ID NO: 96); L520M (SEQ ID NO: 98); F522A (SEQ ID NO: 100); A541V (SEQ ID NO: 102); G553M (SEQ ID NO: 104); N556R (SEQ ID NO: 106); N556E (SEQ ID NO: 108); D562V (SEQ ID NO: 110); D562K (SEQ ID NO: 112); D5621 (SEQ ID NO: 114); N583V (SEQ ID NO: 116); L585K (SEQ ID NO: 118); F653R (SEQ ID NO: 120); K712R (SEQ ID NO: 122); N716R (SEQ ID NO: 124); E731P (SEQ ID NO: 126); N732T (SEQ ID NO: 128); A744T (SEQ ID NO: 130); A744P (SEQ ID NO: 132); A744N (SEQ ID NO: 134); F748A (SEQ ID NO: 136); S751A (SEQ ID NO: 138); K754G (SEQ ID NO: 140); 1757W (SEQ ID NO: 142); 1757K (SEQ ID NO: 144); E771R (SEQ ID NO: 146); N787A (SEQ ID NO: 148); A825R (SEQ ID NO: 150); T826K (SEQ ID NO: 152); T826F (SEQ ID NO: 154); Y832R (SEQ ID NO: 156); Y836Q (SEQ ID NO: 158); Y836K (SEQ ID NO: 160); Y839L (SEQ ID NO: 162); F840L (SEQ ID NO: 164); Y907V (SEQ ID NO: 166); Y9071 (SEQ ID NO: 168); Q916Y (SEQ ID NO: 170); E935R (SEQ ID NO: 172); 1936R (SEQ ID NO: 174); K974G (SEQ ID NO: 176); K1019V (SEQ ID NO: 178); 135L/S469K (SEQ ID NO: 180); 135L/T826F (SEQ ID NO: 182); 140Q/S469K (SEQ ID NO: 184); 140Q/T826F (SEQ ID NO: 186); S469K/K516P (SEQ ID NO: 188); S469K/T826F (SEQ ID NO: 190); Y513G/Y832R (SEQ ID NO: 192); Y513G/F840L (SEQ ID NO: 194); 135L/S469K/T826F (SEQ ID NO: 196); 140Q/S469K/T826F (SEQ ID NO: 198); S469K/K516P/T826F (SEQ ID NO: 200); S469K/T826F/F840L (SEQ ID NO: 202); D303R/S469K/T826F/F840L (SEQ ID NO: 204); F465R/S469K/T826F/F840L (SEQ ID NO: 206); D303R/F465R/S469K/T826F/F840L (SEQ ID NO: 208); or D303R/S469K/K516P/T826F/F840L (SEQ ID NO: 210).

### DESCRIPTION OF THE DRAWINGS

[0016] The patent or application file contains at least one drawing executed in color. Copies of this patent or patent application publication with color drawing(s) will be provided by the Office upon request and payment of the necessary fee.

[0017] FIG. 1A-B show high-throughput characterization of ERCAS12A cleavage activity in E. coli. Three biological replicates of selection were performed and deep-sequenced to determine the enrichment of each ERCAS12A variant. FIG. 1A shows the phenotype scores of synonymous (n=834) and non-synonymous changes (n=22409) over the selection. Notably, most synonymous changes resulted in no apparent enrichment, serving as the baseline activity of wild-type ERCAS12A. FIG. 1B shows the enrichment scores for 23,243 ERCAS12A point mutations over two biological replicates. Results of the high-throughput screen are high reproducible (R²=0.66).

[0018] FIG. 2 shows DNA cleavage activity of ERCAS12A variants in E. coli. Each ERCAS12A mutant was cloned and evaluated in the context of E. coli. The survival rate of E. coli was determined by taking the ratio of colony counts with or without selection pressure. Most mutations resulted in higher survival rate than wild type (WT) ERCAS12A (˜10%). The raw data are shown in FIG. 3-5.

[0019] FIG. 3 shows examples of point mutations of ERCAS12A with enhanced DNA cleavage activity. Clearly, mutations increased the survival rate at TTTC and TTTT PAM sites, indicating an improved cleavage activity over the WT-ERCAS12A.

[0020] FIG. 4 shows examples of point mutations of ERCAS12A with enhanced DNA cleavage activity.

[0021] FIG. 5 shows examples of point mutations of ERCAS12A with enhanced DNA cleavage activity.

[0022] FIG. 6 shows cleavage activity of ERCAS12A variants in E. coli. Each ErCas12a mutant was cloned and evaluated in the context of E. coli. The survival rate of E. coli was determined by taking the ratio of colony counts with or without selection pressure. Most mutations resulted in higher survival rate than WT ERCAS12A (˜18%) FIG. 7A-D show the performance of ERCAS12A variants in human cells as RNP. ERCAS12A variant, and WT proteins were purified and assembled as RNPs using 6 different crRNAs. FIG. 7A-B show the editing efficiency of each variant measured by T7EI 48-hours post-delivery at 200 nM (FIG. 7A) or 50 nM RNP (FIG. 7B) in electroporation reaction. NC: negative control in the absence of ERCAS12A nuclease. FIG. 7C-D show normalized activity of each variant over WT ERCAS12A at 200 nM RNP (FIG. 7C) and 50 nM RNP (FIG. 7D) respectively. The dash line represents the baseline activity of WT protein.

[0023] FIG. 8A-C show the on-target editing efficiency of ERCAS12A point mutations in human cells. FIG. 8A shows the relative editing efficiency of ERCAS12A variants in human cells over two target sites. Plasmids encoding each variant were delivered by lipofection, and the editing efficiency was measured using a T7 endonuclease I assay (T7EI) 2 days post-delivery. FIG. 8B shows the editing efficiency of positive hits from lipofection experiment when delivered as RNP. FIG. 8C shows the normalized editing efficiency of ERCAS12A point mutations to WT.

[0024] FIG. 9A-B show the performance of stacked ERCAS12A variants with multiple point mutations in human cells as RNP. ERCAS12A variants, and WT proteins were purified and assembled as RNPs using 6 different crRNAs. FIG. 9A shows the editing efficiency of each variant measured by T7EI 48-hours post-delivery at 50 nM in electroporation reaction. NC: negative control in the absence of ERCAS12A nuclease. FIG. 9B shows the normalized activity of each variant over WT ERCAS12A at 50 nM RNP.

[0025] FIG. 10A-H shows the relative editing efficiency of ERCAS12A variants in human cells over 9 target sites. Plasmids encoding each variant were delivered by lipofection, and the editing efficiency was measured by NGS 3 days post-delivery. FIG. 10A shows AAVS1; FIG. 10B shows TGFBR2; FIG. 10C shows PD1; FIG. 10D shows TRAC1; FIG. 10D shows B2M-12; FIG. 10E shows CIITA; FIG. 10G shows CISH; and FIG. 10H shows TRAC2.

[0026] FIG. 11 shows the on-target editing efficiency of ERCAS12A Y513G in human cells. ERCAS12A Y513G, and WT proteins were purified and assembled as RNPs using 7 different crRNAs, and the editing efficiency was measured by NGS 2 days post-delivery.

[0027] FIG. 12A-D shows the on-target editing efficiency of ERCAS12A mutants in human cells. WT ERCAS12A, Y513G, S514P, Y513G/F840L and AsCas12a-Ultra (e.g., AsCas12a M537R/F870L) proteins were purified and assembled as RNPs using different crRNAs, and the editing efficiency was measured by NGS 2 days post-delivery. FIG. 12A shows AAVS1; FIG. 12B shows CISH; FIG. 12C showsTRAC1; FIG. 12D shows TRAC2.

[0028] FIG. 13 shows show the performance of stacked ERCAS12A variants with multiple point mutations in human cells as RNP. ERCAS12A variants, and WT proteins were purified and assembled as RNPs using different crRNAs. D303R/S469K/T826F/F840L; F465R/S469K/T826F/F840L; D303R/S469K/K516P/T826F/F840L) improved activity over ERCAS12A WT.

[0029] FIG. 14 shows a summary of the on-target editing efficiency of various ERCAS12A point mutations in human cells.

### DETAILED DESCRIPTION

[0030] Unless otherwise defined, all technical and scientific terms used herein have the same meaning as commonly understood by one of ordinary skill in the art. For example, any nomenclatures used in connection with, and techniques of, cell and tissue culture, molecular biology, immunology, microbiology, genetics, and protein and nucleic acid chemistry and hybridization described herein are well known and commonly used in the art. In case of conflict, the present disclosure, including definitions, will control. Exemplary methods and materials are described below, although methods and materials similar or equivalent to those described herein can be used in practice or testing of the embodiments and aspects described herein.

[0031] As used herein, the terms such as “include,” “including,” “contain,” “containing,” “having,” and the like mean “comprising.” The present disclosure also contemplates other embodiments “comprising,” “consisting of,” and “consisting essentially of,” the embodiments or elements presented herein, whether explicitly set forth or not.

[0032] As used herein, the term “a,” “an,” “the” and similar terms used in the context of the disclosure (especially in the context of the claims) are to be construed to cover both the singular and plural unless otherwise indicated herein or clearly contradicted by the context. In addition, “a,” “an,” or “the” means “one or more” unless otherwise specified.

[0033] As used herein, the term “or” can be conjunctive or disjunctive.

[0034] As used herein, the terms “amino acid,” “nucleotide,” “polynucleotide,” “vector,” “polypeptide,” and “protein” have their common meanings as would be understood by a biochemist of ordinary skill in the art. Standard single letter nucleotides (A, C, G, T, U) and standard single letter amino acids (A, C, D, E, F, G, H, I, K, L, M, N, P, Q, R, S, T, V, W, or Y) are used herein.

[0035] As used herein, the terms “nucleic acid” and “polynucleotide” are interchangeable have the same meaning.

[0036] As used herein, the terms “amino acid sequence,” “polypeptide,” and “protein” are interchangeable have the same meaning.

[0037] As used herein, the term “substantially” means to a great or significant extent, but not completely.

[0038] As used herein, the term “about” or “approximately” as applied to one or more values of interest, refers to a value that is similar to a stated reference value, or within an acceptable error range for the particular value as determined by one of ordinary skill in the art, which will depend in part on how the value is measured or determined, such as the limitations of the measurement system. In one aspect, the term “about” refers to any values, including both integers and fractional components that are within a variation of up to ±10% of the value modified by the term “about.” Alternatively, “about” can mean within 3 or more standard deviations, per the practice in the art. Alternatively, such as with respect to biological systems or processes, the term “about” can mean within an order of magnitude, in some embodiments within 5-fold, and in some embodiments within 2-fold, of a value. As used herein, the symbol “˜” means “about” or “approximately.”

[0039] All ranges disclosed herein include both end points as discrete values as well as all integers and fractions specified within the range. For example, a range of 0.1-2.0 includes 0.1, 0.2, 0.3, 0.4 . . . 2.0. If the end points are modified by the term “about,” the range specified is expanded by a variation of up to ±10% of any value within the range or within 3 or more standard deviations, including the end points.

[0040] As used herein, the terms “control,” or “reference” are used herein interchangeably. A “reference” or “control” level may be a predetermined value or range, which is employed as a baseline or benchmark against which to assess a measured result. “Control” also refers to control experiments or control cells.

[0041] As used herein, the phrase “an effective amount” of a compound described herein refers to an amount of the compound described herein that will elicit the biological response, for example, reduction or inhibition of an enzyme or a protein activity, or ameliorate symptoms, alleviate conditions, slow or delay disease progression, or prevent a disease, etc.

[0042] As used herein, the terms “inhibit,” “inhibition,” or “inhibiting” refer to the reduction or suppression of a given condition, symptom, or disorder, or disease, or a significant decrease in the baseline activity of a biological activity or process.

[0043] As used herein, the terms “Eubacterium rectale Cas12a” or “ERCAS12A” are used interchangeably and refer to the Eubacterium rectale (Er) Cas12a protein (previously named Cpf1), a class 2/type V CRISPR RNA-guided endonuclease.

[0044] The terms “ERCAS12A,” “wild-type ERCAS12A,” or “WT ERCAS12A” refer to a protein having the amino acid sequence of the naturally occurring Eubacterium rectale Cas12a (e.g., SEQ ID NO: 2, encoded by the nucleotide sequence of SEQ ID NO: 1) and that has biochemical activity when combined with a suitable crRNA to form an active CRISPR/Cas12a endonuclease system.

[0045] The term “mutant ERCAS12A protein” or “variant ERCAS12A protein” are used interchangeably and refer to Eubacterium rectale Cas12a protein forms having a different amino acid sequence form the wild-type Eubacterium rectale Cas12a proteins and that have biochemical activity when combined with a suitable crRNA to form an active CRISPR-Cas12a endonuclease system. This includes orthologs and Cas12a variants having different amino acid sequences from the wild-type Eubacterium rectale Cas12a. The mutant ERCAS12A proteins described herein have at least one amino acid substitution to the wild-type ERCAS12A polypeptide sequence. In one aspect, the mutant ERCAS12A polypeptides have at least one amino acid substitution to the wild-type ERCAS12A polypeptide sequence and have an improvement in CRISPR/ERCAS12A-associated nuclease activity at non-canonical TTTT PAM sites as compared to the wild-type ERCAS12A enzyme.

[0046] As used herein, the term “substantially purified,” as applied to a composition, refers to a composition having at least 90% purity or greater, including 90% purity, 95% purity, 99% purity and greater than 99% purity.

[0047] As used herein, the term “isolated,” when used to describe a composition, such as a polynucleotide, a polypeptide or a ribonucleoprotein complex refers to a substantially purified composition, or in the case of a ribonucleoprotein complex, at least one component being a substantially purified component. In further respect to an isolated ribonucleoprotein complex, preferably all components are substantially purified.

[0048] As used herein, the term “affinity tag” refers to a ligand that permits detection and/or selection of an oligonucleotide sequence to which the ligand is attached. For the purposes of this disclosure, a bait may include an affinity tag. In particular, the affinity tag is positioned typically at either or both the N-terminus and/or C-terminus of a polypeptide through conventional chemical coupling technology or recombinant DNA technology. Exemplary affinity tags include biotin, digoxigenin, streptavidin, polyhistine, e.g., (His₆), glutathione-S-transferase (GST), HaloTag®, AviTag, Calmodulin-tag, polyglutamate tag, FLAG-tag, HA-tag, Myc-tag, S-tag, SBP-tag, Softag 3, V5 tag, Xpress tag, a hapten, among others.

[0049] As used herein, the term “eukaryotic cell,” includes those cells of or derived from a particular organism, such as a plant or a mammal, including but not limited to human, or non-human eukaryote or animal or mammal as herein discussed, e.g., mouse, rat, rabbit, dog, livestock, or non-human mammal or primate. In some embodiments, processes for modifying the germ line genetic identity of human beings and/or processes for modifying the genetic identity of animals which are likely to cause them suffering without any substantial medical benefit to man or animal, and also animals resulting from such processes, may be excluded. Preferred human cells include cells derived from somatic cells and germ line cells. Exemplary somatic cells include cells from every major organ and tissue system, including the immune system and hematopoietic system.

[0050] As used herein, the phrase “the odd numbered sequences of SEQ ID NO: 3-209” refers to nucleotide sequences of SEQ ID NO: 3, 5, 7 . . . 207, or 209. See Table 14, where all odd numbered sequences are nucleotide sequences.

[0051] As used herein, the phrase “the even numbered sequences of SEQ ID NO: 4-210” refers to polypeptide sequences of SEQ ID NO: 4, 6, 8 . . . 206, or 210. See Table 14, where all even numbered sequences are polypeptide sequences.

[0052] Described herein are Eubacterium rectale Cas12a (ERCAS12A) variants and methods to enhance the utility of ERCAS12A and variants thereof.

[0053] A bacterial-based directed evolution of ERCAS12A was used to identify mutations with enhanced cleavage activity. First a deep-scanning mutagenesis library containing all possible point mutations on the amino acid level over the entire coding sequence of ERCAS12A was created. Most clones contained only one mutation. This type of library allowed us to directly evaluate the phenotype of each point mutation, by measuring their relative survival rates over the wild-type (WT) protein in the bacterial screen. Briefly, the screening strain harboring the toxin plasmid was transformed with ERCAS12A library and crRNA targeting the HPRT38346 site on the toxin plasmid. After recovery and IPTG induction, cells were plated on LB-Chloramphenicol media with arabinose and incubated at 37° C. overnight. ERCAS12A expression plasmids carried by the survived E. coli cells were extracted and purified. Both input and selected plasmid libraries were PCR amplified, randomly fragmented by Nextera library prep kit, and sequenced on Illumina NextSeq with ˜40 million reads per library. The frequencies of mutations at each position of ERCAS12A in both libraries were measured and normalized to the total coverage of each codon. The relative survival rate of each point mutation was calculated as the ratio of normalized frequency between selected and input library. Since the degree of cell survival under the arabinose selection is indicative of the cleavage activity of ERCAS12A variant at HPRT38346 protospacer, any variants that enriched during the selection over WT would be those with enhanced activity at TTTT PAM.

[0054] Large collection of putative mutations with enhanced activity in the context of E. coli is described. The phenotype of 22,049 point mutations of ERCAS12A in the bacterial screening that measuring the cleavage activity at non-canonical TTTT PAM. Two biological replicates were performed with phenotype measurements which enabled the ability to isolate a large collection of ERCAS12A variants with enhanced cleavage activity.

[0055] The genome editing efficiency of ERCAS12A variants with single or multiple point mutations in human cells were evaluated. ERCAS12A variants were column purified, and delivered to human HEK293 cells as ribonucleoprotein (RNP) to edit 6 genomic targets with canonical TTTV PAM. Editing efficiency of each mutant was quantified by T7EI assay and compared to WT ERCAS12A. This enabled rigorous verification of the activity of putative candidates in the context of human cells without protein overexpression. The editing efficiency was measured by T7 endonuclease I assay (T7E1) 72 hours post-delivery.

[0056] The genome editing efficiency of 10 ERCAS12A variants with single or multiple point mutations in human cells. ERCAS12A variants were column purified, and delivered to human HEK293 cells as ribonucleoprotein (RNP) to edit 6 genomic targets with canonical TTTV PAM. Editing efficiency of each mutant was quantified by T7EI assay and compared to WT ERCAS12A. This enabled rigorous verification of the activity of putative candidates in the context of human cells without protein overexpression. The editing efficiency was measured by T7 endonuclease I assay (T7EI) 72-hours post-delivery.

[0057] One embodiment described herein is a CRISPR-associated protein comprising a polypeptide encoding a variant of ERCAS12A. The isolated polypeptide comprising a ERCAS12A variant is selected from a polypeptide having one or more amino acid substitutions presented in Table 2 relative to wild type ERCAS12A (SEQ ID NO: 2).

[0058] Another embodiment described herein is an ErCas12a variant selected from a polypeptide a polypeptide having one or more amino acid substitutions presented in Table 2 relative to wild type ERCAS12A (SEQ ID NO: 2), wherein the selected ERCAS12A variant displays improved genome editing relative to wild type ERCAS12A (SEQ ID NO: 2), wherein the selected ERCAS12A variant displays improved genome editing relative to wild type ERCAS12A (SEQ ID NO: 2).

[0059] Another embodiment described herein is CRISPR ribonucleoprotein complex is provided. The CRISPR ribonucleoprotein including a polypeptide encoding a variant of ERCAS12A. The variant of ERCAS12A is selected from the ERCAS12A variant is selected from a polypeptide having one or more amino acid substitutions presented in Table 2 relative to wild type ERCAS12A (SEQ ID NO: 2).

[0060] Another embodiment described herein is method of increasing efficiency of gene editing at TTTN PAM sites in a cell with a CRISPR ribonucleoprotein complex is provided. The method includes the step of contacting a cell with the CRISPR ribonucleoprotein complex. The CRISPR ribonucleoprotein complex includes a guide RNA and a CRISPR-associated protein. The CRISPR-associated protein including a polypeptide encoding a variant of ERCAS12A. The variant of ERCAS12A is selected from the ERCAS12A variant is selected from a polypeptide having one or more amino acid substitutions presented in Table 2 relative to wild type ERCAS12A (SEQ ID NO: 2).

[0061] Another embodiment described herein is a kit comprising a guide RNA and a CRISPR-associated protein is provided. The CRISPR-associated protein includes a polypeptide encoding a variant of ERCAS12A.

[0062] Another embodiment described herein is a CRISPR-associated protein comprising a polypeptide encoding a variant of ERCAS12A, wherein comprises at least one variant amino acid selected from amino acid positions M1G, N2C, N31, T5D, T5F, T5V, N6P, N7A, N7D, N7E, N71, N7Q, N7Y, F8H, F8K, Q9D, N10A, N10E, F11E, F11Q, 112L, 112Q, 114E, 114H, 114L, 114N, 114V, S15K, S15M, S15T, S16H, S16M, S16N, Q181, Q18M, Q18N, Q18R, Q18T, Q18V, Q18W, A24E, 126P, P27C, P27F, P27G, P27H, P27K, P27L, P27M, P27R, P27Y, T28G, T30D, T30F, T30H, T30Q, T30V, T30W, T31A, T31C, T31D, T31G, T31H, T31L, T31M, T31N, T31P, T31S, Q32A, Q32C, Q32F, Q32G, Q321, Q32K, Q32L, Q32M, Q32N, Q32P, Q32S, Q32T, Q32V, Q32W, Q32Y, Q33F, Q331, Q33P, Q33V, Q33W, Q33Y, F34A, F34L, F34P, F34R, F34W, 135A, 135C, 135E, 135F, 135G, 135K, 135L, 135M, 135N, 135P, 135Q, 135S, 135T, 135V, 135W, 135Y, V36K, V36M, V36P, K37P, N38A, N38D, N38E, N38G, N38H, N381, N38L, N38M, N38P, N38Q, N38R, N38S, N38T, N38V, G39A, G39C, G39D, G39E, G39F, G39H, G391, G39K, G39L, G39M, G39N, G39P, G39Q, G39R, G39S, G39T, G39V, G39W, G39Y, 140C, 140D, 140E, 140K, 140L, 140N, 140P, 140Q, 140R, 140T, 140V, 140W, 140Y, E43C, E431, E43L, E43Q, E43S, E43T, E43V, E45F, E45R, L46C, L46D, L46E, L46G, L46H, L46K, L46N, L46S, L46T, E49C, E49F, E49H, E491, E49K, E49L, E49M, E49N, E49P, E49R, E49S, E49T, E49Y, N50Q, Q52C, Q52V, L54G, D56A, D56K, D56P, D56R, 157A, 157C, 157E, 157G, 157L, 157P, 157Q, 157T, 157V, D59A, D59G, D591, D59L, D59M, D59Q, D59R, D59S, D59T, D60A, D60F, D60G, D60K, D60L, D60M, D60N, D60P, D60R, D60T, D60V, D60Y, Y62A, Y62F, Y62N, Y62Q, Y62V, R63M, R63V, F65E, F65K, F65R, S67A, S67F, S67Q, S67V, S67W, S67Y, E68A, E68R, E68V, T69D, T69F, T69H, T69L, T69M, T69W, S71Q, 173E, D75R, 176F, 176G, 176Q, D77P, T79E, T79R, S80N, S80Q, S80V, L81E, L81H, L81W, L81Y, F82Q, K84F, M85A, M85E, M85F, M85G, M85N, M85Q, M85W, M85Y, E86N, 187A, 187G, 187H, 187W, Q88E, Q88N, Q88S, L89C, L89D, L89G, L89Q, L89S, K90P, N91V, G92D, G92F, D93L, D93M, D93N, D93P, D93R, D93T, N94P, K95E, K95F, K951, K95L, K95P, K95S, K95T, K95W, D96C, T97W, L98A, L98C, L98D, L98G, L98H, L98N, L98P, L98Q, L98S, L98T, 199W, 199Y, E101P, Q1021, Q102V, T103Y, E104P, Y105A, Y105G, Y105P, Y105R, Y105T, R1061, R106T, R106V, A108R, K111A, K111C, K111F, K111G, K111S, K111T, K111V, K111W, K112C, K112D, K112E, K112H, K112L, K112P, K112R, K112T, F113A, A114E, A114S, N115M, N115W, R118A, R118D, R118N, R118V, R118Y, F119D, F119H, K120A, K120C, K120P, K120T, K120V, N121F, M122W, F123E, S124N, L127Q, 1128Q, S129D, S129F, S129G, S1291, D1301, L132A, L132G, L132T, F135A, F135D, F135H, F135T, V136Y, 1137Q, H138A, H138M, H138S, H138V, N139A, N139C, N139F, N139G, N1391, N139L, N139P, N139Q, N139R, N140C, N140G, N140P, N140S, N140T, N141F, N141P, Y142E, Y142G, Y142K, Y142P, Y142R, Y142V, S143E, S143G, S1431, S143R, S143V, A144C, A144D, A1441, A144K, A144N, A144P, A144R, A144T, E1461, E146M, E146R, E146S, E146T, K147A, K147F, K147G, K147L, K147Q, E148C, E148P, E149L, E149R, K150A, K150C, K150G, K1501, K150L, K150V, K150W, K150Y, T151C, T151E, T151Q, T151V, V153K, 1154A, 1154E, 1154H, 1154P, 1154Q, L156C, S158D, S158G, S158K, S158N, F160H, S1631, F164Q, K165Y, Y1671, Y167L, Y167M, K169C, K169F, A172Y, C1741, C174T, C174V, A177M, A177W, D178R, D179P, D179W, S181H, S181N, S181V, S184C, S1841, S184L, S184M, S184V, 1188A, 1188C, 1188W, N190Q, N190R, N192C, N192G, A193F, A193H, A193L, A193N, A193Q, 1195W, F196T, F197E, F197H, F197K, F197Q, F197R, S198D, S198E, S198K, S198N, A200H, A2001, V202C, V202H, R205C, R205M, R205T, 1206D, 1206W, 1206Y, V207W, S209K, L210N, D214T, D214W, 1215A, 1215W, N216F, K217A, K217D, K217V, S219D, S219F, S219P, S219W, G220Y, D221C, D2211, D221L, D221N, D221P, D221R, D221S, M222C, M222P, K223C, K223F, K223G, K223P, D224H, S225A, S225W, S225Y, L226D, L226Y, E228F, E228P, E228T, E228W, M229S, S230E, S230G, L231D, L231K, L231R, E233S, 1234G, 1234W, Y235A, Y235L, Y235N, Y235Q, Y235T, Y235W, S236G, S236K, S236N, S236V, S236W, E238F, E238S, K239F, K239G, K239T, K239V, K239W, G241F, G241H, G241M, G241P, G241Q, G241W, F243H, F243R, 1244F, 1244G, 1244Q, 1244W, 1244Y, T245E, T245K, T245L, T245Q, T245V, T245Y, E247C, E2471, E247M, E247T, G248K, G248M, S250N, N253A, N253G, N253Q, N253W, D2541, D254M, D254Q, D254R, D254S, D254W, C256E, C256H, C256M, C256N, C256Q, K258L, V259N, V259Q, V259Y, S261F, S261H, F262G, F262K, F262P, F262R, M263C, M263E, M263S, L265K, L265W, Y266E, Y266P, Y266R, C267E, C267K, C267M, C267P, C267T, Q268C, Q268G, Q268V, K269Y, N270E, N270G, K271C, K271H, K2711, K271W, E272G, E272K, E272P, E272S, E272Y, N2731, N273R, N273S, N275G, L276K, L276N, Y277L, Y277M, Y277P, K278A, K278F, K278L, K278P, K278S, K278W, Q280D, Q280M, K281D, K281F, K281G, L282K, L282S, H283M, Q285M, Q285T, 1286C, C288G, C288K, 1289W, A2901, A290K, A290N, A290R, D291F, D291L, D291M, D291N, D291P, D291T, D291W, T292H, S293H, S293K, S293W, Y294L, Y294M, Y294V, E295C, E295M, E295R, E295T, V296A, V296D, V296G, V296H, V296K, V296M, V296N, V296P, V296Q, V296R, V296T, V296W, V296Y, P297C, P297F, P297H, P2971, P297K, P297M, P297N, P297R, P297V, P297W, P297Y, K299A, K299E, K299G, K299P, K299V, K299W, F300D, F300E, F300K, F300M, F300Q, E301A, E301C, E301F, E301G, E301K, E301M, E301P, E301Q, E301R, E301T, E301W, S302A, S302C, S302D, S302E, S302G, S302H, S3021, S302M, S302N, S302V, S302W, D303C, D303F, D303G, D303H, D3031, D303K, D303M, D303N, D303P, D303Q, D303R, D303S, D303V, D303W, D303Y, E304T, E305A, E305C, E305F, E305G, E305H, E3051, E305K, E305L, E305M, E305N, E305P, E305R, E305S, E305V, E305W, E305Y, V306C, V306F, V306W, V306Y, Y307A, Y307D, Y307E, Y307G, Y3071, Y307K, Y307L, Y307N, Y307P, Y307Q, Y307R, Y307S, Y307T, Y307V, Y307W, Q3081, Q308W, S309K, S309L, S309M, S309V, V310Y, N311F, N311L, G312A, G312E, G3121, G312K, G312Q, G312S, G312T, F313H, F313M, D3151, D315M, 1317W, S318D, S318K, S3191, S319K, S319N, K320F, H321F, H321V, 1322A, E324C, E324M, E324T, E324W, E324Y, R325K, R327K, R327M, R327V, D331C, D331M, Y333M, N334W, G335Q, Y336H, Y336M, Y336V, Y336W, N337G, D339M, D339Q, D339S, K340A, K340E, K340H, Y342M, Y342R, 1343V, V344E, K346C, F347G, F347R, Y348M, Y348V, E349K, E349N, E349Q, E349R, E349T, S350H, S350R, V351D, V351F, V351K, V351Y, S352M, Q353K, Q353M, Q353N, Q353R, T355M, Y356A, Y356C, Y356E, Y356G, Y3561, Y356M, Y356V, R357K, R357M, D358R, D358W, T361K, T364W, A365N, A365Y, E367M, E367P, 1368P, 1368Y, H369A, H369E, H369G, H3691, H369V, Y370A, Y370G, Y370N, Y370P, Y370R, N371C, N371G, N372A, N372F, N372W, 1373D, L374E, L374H, L374N, L374Y, P3751, P375Y, G376Q, N377L, N377P, N377V, G378N, G378W, K379A, K379F, K379G, K379R, K381L, K381P, K381W, D383M, D383P, K384D, K384G, K384P, V385C, V385Y, K386F, A388H, A3881, A388N, A388Y, V389E, K390C, N391W, N391Y, L393D, L393Y, Q394A, Q394C, Q394F, Q394G, Q3941, Q394M, Q394S, Q394T, Q394V, Q394W, K395F, K3951, K395V, 1397C, 1397Q, T398D, T398F, E399M, 1400E, E402H, S405K, S405M, S405R, N406A, N406V, Y4071, Y407P, Y407R, K408C, K408D, K4081, C410F, S411N, S411V, D413R, D413T, D413W, N414A, N414D, N414H, N414L, N414S, 1415C, 1415E, K416P, K416V, K416W, A417C, A417M, E418W, T419G, T419H, T419Y, Y420K, Y420Q, Y420R, Y420V, 1421 F, H422A, H422C, H422F, H422M, E423A, E423H, E423R, E423S, E423T, E423Y, S425E, S425K, H426G, H4261, 1427H, L428T, L428Y, N429A, N429P, F431A, F431R, E432C, E432L, E432R, E432T, Q434F, Q4341, Q434L, Q434P, Q434S, Q434T, Q434W, E435A, E435L, E435Y, L436A, L436D, L436E, L436G, L436K, L436P, L436R, L436S, L436T, L436W, K437C, K437H, K437P, K437W, Y438A, Y438E, Y438G, Y4381, Y438K, Y438L, Y438P, Y438R, Y438W, N439A, N439G, N439H, N439P, N439S, P440A, P440D, P440E, P440G, P440K, P440L, P440M, P440N, P440Q, P440R, P440S, P440T, E441F, E441G, E441H, E441K, E441N, E441R, 1442A, 1442G, 1442P, 1442Y, H443A, H443E, H443F, H443W, L444A, L444C, L444D, L444E, L444G, L444H, L4441, L444K, L444N, L444T, L444W, L444Y, V445C, V445E, V445K, V445P, V445Q, V445R, V445W, E446P, E446T, E446W, S447D, S447F, S4471, S447L, S447P, S447Q, S447W, S447Y, E448A, E448H, E4481, E448W, E448Y, L449D, K450C, K450G, K450S, K450V, A451C, A4511, A451M, S452G, S452P, S452V, E453F, E453W, L454R, L454S, L454Y, N456M, N456P, N456Q, N456R, V457E, V457T, V457Y, V460E, V460H, V4601, V460K, V460N, V460P, 1461C, 1461Y, N463A, F465A, F465E, F465G, F465K, F465N, F465Q, F465R, F465S, F465T, F465V, H466C, H466K, S469K, S469L, S469M, S469P, S469R, S469V, V470K, V470N, V470Y, M472G, T473F, T473G, T473R, E474P, L476G, L476H, L476K, L476N, L476R, L476T, V477D, V477E, V477M, V477Q, V477T, V477W, K479A, K479D, K479H, D480P, D480Q, N481A, N481D, N482A, N482D, N482H, N482Q, N482S, F483A, F483W, Y484G, Y484R, Y484V, A485H, A485K, A485L, A485Q, A485R, A485S, E486A, E486F, E486G, E486L, E486R, E486S, E486Y, E488Q, E488T, E489C, E489H, E489M, E489S, E489T, E489W, 1490A, 1490E, Y491E, Y491Q, D4921, D492K, D492L, E493C, E493R, Y495V, P496C, P496E, P4961, P496K, P496L, P496S, P496V, P496W, V497W, 1498G, 1498K, 1498P, 1498R, S499C, S499G, S499M, L500S, L503D, L503E, L503G, L503H, L5031, L503K, L503N, L503P, L503R, L503W, V504A, V504C, V504G, V504T, Y507A, Y507C, Y507E, Y507G, Y5071, Y507K, Y507L, Y507Q, Y507R, Y507S, Y507T, Y507V, Y507W, T509L, T509M, T509V, Q51OA, Q510C, Q510D, Q51OE, Q51OF, Q510G, Q510H, Q5101, Q510K, Q510M, Q510N, Q510P, Q510R, Q510S, Q510T, Q510V, Q51OW, Q510Y, K511F, K511G, K511S, K511V, K511Y, P512C, P512D, P512E, P512F, P512G, P512H, P5121, P512N, P512R, P512S, P512T, P512V, P512W, P512Y, Y513A, Y513C, Y513D, Y513E, Y513G, Y513H, Y5131, Y513K, Y513L, Y513M, Y513N, Y513P, Y513Q, Y513R, Y513S, Y513T, Y513V, S514A, S514D, S514F, S514G, S514H, S514K, S514L, S514N, S514P, S514R, S514W, T515A, T515C, T515G, T515L, T515M, T515P, T515S, T515Y, K516A, K516P, K516R, K516S, K516T, K517A, K517D, K517G, K517L, K517P, 1518E, 1518F, 1518L, 1518P, 1518Q, 1518S, 1518T, L520A, L520G, L520H, L520M, L520N, L520Q, L520S, N521E, N521F, N521L, N521P, N521R, F522A, F522C, F522G, F522M, G523A, G523Q, A5281, Y537F, S538C, S538N, A5411, A541L, A541M, A541N, A541Q, A541T, A541V, 1543A, 1543C, 1543F, 1543G, 1543H, 1543Q, 1543S, 1543T, 1543W, L544W, L544Y, M545E, M545Q, R546F, L549D, L552E, L552K, L552Q, G553A, G5531, G553L, G553M, G553S, G553T, G553V, 1554C, F555M, N556A, N556C, N556E, N556F, N556K, N556M, N556Q, N556R, N556V, N556W, A557K, A557S, K558E, K558F, K558H, K558M, K558S, K558T, N559A, N559E, N559G, D562C, D562F, D5621, D562K, D562L, D562M, D562Q, D562T, D562V, D562W, K564A, K564D, K564G, 1565F, 1565R, 1566A, 1566W, E567L, E567Q, E567W, N569P, N569W, T570D, T570F, S571M, S571Q, S571W, S571Y, E572M, K574F, K5741, K574V, G575D, G575W, Y577M, Y577P, K578A, K578C, K578F, M580Q, 1581H, N583A, N583G, N5831, N583S, N583T, N583V, L585K, P586F, G587C, G587H, G602A, E6041, E604T, T605C, T605G, K607C, S609C, S609E, S609K, A610H, A6101, A610N, A610Y, L613G, E6141, K617C, K617Q, K617V, Q618D, N619C, N619R, K620F, S624W, S625N, K6261, K626V, K626Y, H634K, L636H, D638C, D6381, D638S, Y639G, Y639H, Y639M, Y639N, Y639T, N642A, N642M, C643F, C643T, 1644A, 1644Y, A645M, A645N, A645Q, P648C, P6481, P648M, F653R, G654P, F655H, D656G, D656K, S658D, D659K, S661G, S661M, S661Q, E664F, E664R, E664S, S667R, G668M, G668Q, F669P, F669R, L675C, Q676S, Q676T, Q676V, Q676W, Y678F, Y678H, 1680A, 1680F, 1680H, 1680N, 1680Q, 1680S, 1680V, D6811, D681K, D681M, D681Q, D681R, D681T, D681W, W682A, W682D, W682E, W682G, W6821, W682K, W682M, W682N, W682Q, W682T, W682V, T683F, T683Y, 1685Y, S686R, S686T, E687N, K688D, K688V, D691R, L692M, L693A, L693D, L693E, L693G, L693M, L693Q, L693T, L693W, Q694C, Q694G, Q6941, Q694K, Q694R, Q694S, Q694W, Q694Y, E695S, G6971, G697N, G697P, Q698A, Q698F, L699C, L699F, L699Y, Y700A, Y700G, Y7001, Y700T, Y700V, L701P, L701W, F702A, F702C, F702G, F702H, F702L, F702M, F702N, F702Q, F702S, F702T, F702V, Q703C, K711L, K711P, K712A, K712C, K712F, K712G, K712H, K712Q, K712R, K712S, K712W, K712Y, S713R, T714N, T714W, T714Y, N716A, N716C, N7161, N716K, N716M, N716Q, N716R, N716T, N716V, D717A, D717P, L719K, K725Y, L727H, L7271, L727T, F728T, S729H, S729K, E730G, E7301, E730L, E730M, E730V, E731A, E731L, E731P, N732D, N732T, L7331, L733K, D735K, D735R, V737Q, L738E, N741C, N741G, E743N, A744C, A744N, A744P, A744S, A744T, E745P, F748A, F748C, F748D, F748E, F748G, F748H, F7481, F748M, F748N, F748Q, F748R, F748S, F748T, F748V, F748W, K750A, K750E, K750F, K750G, K750H, K750L, K750N, K750P, K750S, K750T, K750W, K750Y, S751A, S751C, S751D, S751E, S751F, S751G, S751H, S751L, S751M, S751N, S751P, S751Q, S751R, S751T, S751V, S752C, S752F, S752G, S752H, S7521, S752L, S752M, S752Q, S752V, S752W, S752Y, 1753E, K754A, K754C, K754D, K754E, K754F, K754G, K754H, K7541, K754L, K754N, K754P, K754Q, K754S, K754T, K754V, K754W, K754Y, P756H, P7561, P756K, P756L, P756M, P756N, P756S, P756T, 1757A, 1757C, 1757F, 1757G, 1757K, 1757L, 1757M, 1757P, 1757Q, 1757R, 1757S, 1757W, 1757Y, 1758A, 1758C, 1758E, 1758G, 1758K, 1758Q, 1758S, 1758T, 1758V, G762K, 1764Q, V766Y, N767R, R768K, T769L, E771A, E771C, E771F, E771H, E7711, E771K, E771M, E771Q, E771R, E771S, E771T, E771V, E771W, E771Y, A772W, E7731, E773P, E774H, E7741, E774K, E774L, E774M, E774Q, E774R, E774S, E774T, E774V, E774W, K775C, Q777R, Q777V, F778G, F778K, F778Q, F778R, 1783Q, V784F, V784H, V7841, V784L, V784R, V784W, V784Y, N787A, N787C, N787F, N787G, N787H, N787M, N787P, N787Q, N787R, N787S, N787W, 1788F, 1788Y, P789C, E790A, E790C, E790F, E790G, E790H, E7901, E790K, E790M, E790N, E790P, E790Q, E790R, E790S, E790T, E790V, E790W, E790Y, N791E, N791F, N791G, Y793Q, Y793R, Y793V, Y793W, Q794L, Q794P, Y797W, K798L, F800W, N801A, N801S, K803A, S804F, S8041, K806C, S809G, A813H, E823A, E823P, E823S, A825H, A825K, A825R, T826C, T826F, T826H, T8261, T826K, T826L, T826M, T826N, T826Q, T826R, T826W, T826Y, N827D, N827E, V829T, D831L, D831M, D831N, D831Q, D831R, Y832A, Y832E, Y832G, Y832K, Y832M, Y832N, Y832Q, Y832R, Y836A, Y836C, Y836D, Y836E, Y836G, Y836H, Y8361, Y836K, Y836L, Y836M, Y836N, Y836Q, Y836R, Y836S, Y836T, Y836V, D837P, Y839A, Y839C, Y839H, Y8391, Y839K, Y839L, Y839M, Y839N, Y839Q, Y839R, Y839S, Y839T, Y839V, L841C, L841G, L8411, L841V, L841Y, M843F, M843Q, P844C, 1845Q, T846G, T846L, T846Q, T846W, T846Y, N848D, F849R, A851N, A851T, 1857A, 1857N, D859P, R860E, R860K, 1861A, L862D, L862H, L862Y, A866D, A866Y, K869C, H872M, H872S, 1876L, V886A, V886G, V886S, T8911, C892D, C892H, C8921, C892T, G893K, N894V, E897Y, Q898G, F901G, F901L, F901M, F901Q, 1903V, Y9071, Y907M, Y907T, Y907V, Y909F, Y909W, Q91OA, Q91ON, Q910S, Q910Y, 1911A, 1911D, 1911E, 1911G, 1911H, 1911Q, 1911W, 1911Y, K912C, K912H, K912Y, K914A, K914C, K914F, K914M, K914Q, K914S, K914T, Q916A, Q916D, Q916L, Q916M, Q916N, Q916V, Q916W, Q916Y, G918D, G918E, G918F, G918H, G9181, G918K, G918L, G918M, G918Q, G918T, G918Y, A919E, A919F, A9191, A919L, A919M, A919Y, Q921A, Q921T, 1922A, 1922C, 1922H, 1922R, 1922W, 1922Y, K925C, E926N, E926S, E926T, K928W, E929C, E929G, E929N, E929P, E929S, G931H, G931Q, K934S, E935A, E935C, E935F, E935G, E935H, E935K, E935L, E935M, E935N, E935Q, E935R, E935S, E935T, E935W, E935Y, 1936A, 1936C, 1936F, 1936G, 1936K, 1936L, 1936Q, 1936R, 1936S, 1936T, 1936Y, L941C, L941N, S942A, L9431, V944C, 1945M, H946W, E947F, E947M, E947P, 1948L, S9491, S949K, S949M, S949Q, S949T, S949V, M951G, V952E, V952W, 1953A, 1953P, K954A, K954P, Y955C, Y955W, N956C, N956F, N956W, N956Y, A957F, A957P, A957T, 1958V, 1959F, D963C, F968W, K970C, K974A, K974C, K974E, K974G, K974M, K974P, K974Q, K974S, K974T, K974W, K974Y, V9751, R977H, K982S, K982Y, F983A, M986G, 1988E, 1988K, L991C, L991W, N992A, N992L, L994A, V995P, F996T, F996V, D998T, D998W, 1999H, 1999P, 11001W, T1002C, T1002L, T1002S, T1002V, E1003M, E1003S, N1004A, N1004G, N1004P, N1004Q, N1004R, L1007A, L1007C, L1007V, L1008F, Y10111, Y1011L, Y1011V, T1014C, Y1015A, Y1015E, Y1015G, Y1015M, Y1015Q, Y1015T, 11016A, 11016E, 11016N, 11016P, P1017D, P1017E, P1017G, P1017N, P1017Q, P1017W, K1019A, K1019C, K1019G, K1019S, K1019V, K1021A, K1021F, K1021V, K1021W, V1023C, V1023N, G1024Y, Q1026M, Q1026N, C1027N, C1029N, Y1032K, Y1032Q, Y1032R, Y1032W, A1036F, A1036H, K1040A, K10401, K1040T, 11050D, 11050H, 11050W, K1052C, K1052G, K10521, K1052W, F1053Y, K1054F, K10541, K1054L, K1054M, K1054V, K1054W, D1055C, D1055F, D10551, D1055L, D1055M, D1055P, D1055Q, D1055T, D1055V, L1056C, L1056E, L10561, T1057Y, V1058H, V1058W, A1060N, A1060Q, K1061C, K1061D, K1061E, K1061F, K10611, K1061L, K1061Q, K1061R, K1061S, K1061T, K1061W, R1062A, R1062D, R1062H, R1062M, R1062V, R1062Y, E1063F, E1063G, E1063W, 11065W, F1068N, D1069M, S1070E, R1072D, R1072E, D1074R, D1074S, S1075V, E1076T, K1077R, C1081A, C10811, T1083E, T1083K, T1083M, T1083Y, N1087A, N1087W, N1088A, N1088P, 11090G, T1091C, T1091W, Q1092A, Q1092C, Q1092F, Q10921, Q1092Y, N1093C, T10941, T1094P, T1094Y, V1095A, V1095D, V1095R, M1096C, S1097D, K1098C, K1098V, K1098W, S1099P, S1099Q, S1100D, S1100G, S1100H, S1100M, S1100Q, Y11061, K1111R, K1111V, R1113E, R11131, R1113K, R1113N, R1113T, R1118F, R1118M, R1118Q, F1119A, F1119N, F1119W, S1120D, D1124T, T1125D, T1125E, T1125H, T1125M, T1125W, 11126A, 11126C, 11126E, T1129H, T11291, T1129V, D1131L, D1131S, E1133T, K11341, T1135Q, T1135R, T1135V, E1137L, E1137N, E1137Q, M1138D, M1138G, T1139Q, T1139V, T1139Y, 11141C, 11141P, N1142A, W1143F, D1145F, G1146K, R1150N, Q1151C, D1155M, 11158A, V1159D, F1163C, F1163N, E1164P, 11165A, L1179D, L1179E, L1179N, R1182K, R1182N, R1182Q, R1182Y, D1183Y, Y1184W, R1186M, L1187M, L1192K, L1192Y, E1194C, E1194F, E1194S, N1195S, N1195Y, N1196A, 11197G, 11197W, A1204C, A1204D, A1204F, A1204M, A1204N, A1204Q, D1206C, D1206F, D12061, A1207Q, L1208A, L1208Q, D1211C, D1211S, D1211T, A1212C, A1212M, A1212S, A1212T, A1212V, N1215G, E1227T, 11228H, 11228Y, K1229T, Q1230C, Q1230G, Q1230T, E1233W, E1233Y, N1234A, N1234E, N1234F, N12341, W1235E, W1235Y, K1236F, K1236P, E1237A, E1237F, E1237G, E12371, G1239H, G1239K, G1239L, G1239Q, G1239T, K1240Y, F1241P, S1242E, S1242Q, D12441, K1245G, K1245V, S1249E, S1249Q, S1249W, N1250A, N1250G, N1250L, N1250P, D1252L, F1254T, D1255M, F1256R, F1256W, K1260F, K1260G, K1260H, R1261M, R1261N, R1261V, R1261W, R1261Y, Y1262M, L1263A, L1263E, L1263N, L1263Q, or combinations thereof, provided that the variant ERCAS12A provides an improvement in CRISPR/ERCAS12A associated nuclease activity.

[0063] In one aspect, the ERCAS12A variant comprises at least one variant amino acid selected from amino acid positions Q18V, 135L, G39K, G39Q, 140Q, D56P, D56R, D59A, D59R, S158G, K165Y, S181V, A290K, D291N, V296R, P297F, P297R, P297V, D303C, D303R, E305K, Y307K, Q353R, L444W, F465R, S469K, V470K, 1498K, Y507R, Y507S, Y507W, Q510K, Q510V, Q510Y, P512G, P512V, Y513G, Y513L, Y513R, Y513S, S514P, S514R, T515P, K516P, K516R, K517P, 1518P, L520M, F522A, A541V, G553M, N556E, N556R, D5621, D562K, D562V, N583V, L585K, F653R, K712R, N716R, E731P, N732T, A744N, A744P, A744T, F748A, S751A, K754G, 1757K, 1757W, E771R, N787A, A825R, T826F, T826K, Y832R, Y836K, Y836Q, Y839L, F840L, Y9071, Y907V, Q916Y, E935R, 1936R, K974G, K1019V, 135L/S469K, 135L/T826F, 140Q/S469K, 140Q/T826F, S469K/T826F, S469K/K516P, Y513G/F840L, Y513G/Y832R, 135L/S469K/T826F, 140Q/S469K/T826F, S469K/K516P/T826F, S469K/T826F/F840L, D303R/S469K/T826F/F840L, F465R/S469K/T826F/F840L, D303R/F465R/S469K/T826F/F840L, D303R/S469K/K516P/T826F/F840L, or combinations thereof.

[0064] Another embodiment described herein is a CRISPR ribonucleoprotein complex is provided. The CRISPR ribonucleoprotein complex includes a guide RNA and a CRISPR-associated protein. The CRISPR-associated protein includes a polypeptide encoding a variant of ERCAS12A comprising at least one variant amino acid selected from amino acid positions Q18V, 135L, G39K, G39Q, 140Q, D56P, D56R, D59A, D59R, S158G, K165Y, S181V, A290K, D291N, V296R, P297F, P297R, P297V, D303C, D303R, E305K, Y307K, Q353R, L444W, F465R, S469K, V470K, 1498K, Y507R, Y507S, Y507W, Q510K, Q510V, Q510Y, P512G, P512V, Y513G, Y513L, Y513R, Y513S, S514P, S514R, T515P, K516P, K516R, K517P, 1518P, L520M, F522A, A541V, G553M, N556E, N556R, D5621, D562K, D562V, N583V, L585K, F653R, K712R, N716R, E731P, N732T, A744N, A744P, A744T, F748A, S751A, K754G, 1757K, 1757W, E771R, N787A, A825R, T826F, T826K, Y832R, Y836K, Y836Q, Y839L, F840L, Y9071, Y907V, Q916Y, E935R, 1936R, K974G, K1019V, 135L/S469K, 135L/T826F, 140Q/S469K, 140Q/T826F, S469K/T826F, S469K/K516P, Y513G/F840L, Y513G/Y832R, 135L/S469K/T826F, 140Q/S469K/T826F, S469K/K516P/T826F, S469K/T826F/F840L, D303R/S469K/T826F/F840L, F465R/S469K/T826F/F840L, D303R/F465R/S469K/T826F/F840L, D303R/S469K/K516P/T826F/F840L, or combinations thereof, provided that the variant ERCAS12A provides an improvement in CRISPR/ERCAS12A-associated nuclease activity.

[0065] Another embodiment described herein is a method of increasing efficiency of gene editing in a cell with a CRISPR ribonucleoprotein complex is provided. The method includes a step of contacting a cell with the CRISPR ribonucleoprotein complex that includes a guide RNA and a CRISPR-associated protein. The CRISPR-associated protein includes a polypeptide encoding a variant of ERCAS12A comprising at least one variant amino acid selected from amino acid positions Q18V, 135L, G39K, G39Q, 140Q, D56P, D56R, D59A, D59R, S158G, K165Y, S181V, A290K, D291N, V296R, P297F, P297R, P297V, D303C, D303R, E305K, Y307K, Q353R, L444W, F465R, S469K, V470K, 1498K, Y507R, Y507S, Y507W, Q510K, Q510V, Q510Y, P512G, P512V, Y513G, Y513L, Y513R, Y513S, S514P, S514R, T515P, K516P, K516R, K517P, 1518P, L520M, F522A, A541V, G553M, N556E, N556R, D5621, D562K, D562V, N583V, L585K, F653R, K712R, N716R, E731P, N732T, A744N, A744P, A744T, F748A, S751A, K754G, 1757K, 1757W, E771R, N787A, A825R, T826F, T826K, Y832R, Y836K, Y836Q, Y839L, F840L, Y9071, Y907V, Q916Y, E935R, 1936R, K974G, K1019V, 135L/S469K, 135L/T826F, 140Q/S469K, 140Q/T826F, S469K/T826F, S469K/K516P, Y513G/F840L, Y513G/Y832R, 135L/S469K/T826F, 140Q/S469K/T826F, S469K/K516P/T826F, S469K/T826F/F840L, D303R/S469K/T826F/F840L, F465R/S469K/T826F/F840L, D303R/F465R/S469K/T826F/F840L, D303R/S469K/K516P/T826F/F840L, or combinations thereof, provided that the variant ERCAS12A provides an improvement in CRISPR/ERCAS12A-associated nuclease activity.

[0066] Another embodiment described herein is a kit including a guide RNA and a CRISPR-associated protein comprising a polypeptide encoding a variant of ERCAS12A is provided. The variant of ERCAS12A comprising at least one variant amino acid selected from amino acid positions Q18V, 135L, G39K, G39Q, 140Q, D56P, D56R, D59A, D59R, S158G, K165Y, S181V, A290K, D291N, V296R, P297F, P297R, P297V, D303C, D303R, E305K, Y307K, Q353R, L444W, F465R, S469K, V470K, 1498K, Y507R, Y507S, Y507W, Q510K, Q510V, Q510Y, P512G, P512V, Y513G, Y513L, Y513R, Y513S, S514P, S514R, T515P, K516P, K516R, K517P, 1518P, L520M, F522A, A541V, G553M, N556E, N556R, D5621, D562K, D562V, N583V, L585K, F653R, K712R, N716R, E731P, N732T, A744N, A744P, A744T, F748A, S751A, K754G, 1757K, 1757W, E771R, N787A, A825R, T826F, T826K, Y832R, Y836K, Y836Q, Y839L, F840L, Y9071, Y907V, Q916Y, E935R, 1936R, K974G, K1019V, 135L/S469K, 135L/T826F, 140Q/S469K, 140Q/T826F, S469K/T826F, S469K/K516P, Y513G/F840L, Y513G/Y832R, 135L/S469K/T826F, 140Q/S469K/T826F, S469K/K516P/T826F, S469K/T826F/F840L, D303R/S469K/T826F/F840L, F465R/S469K/T826F/F840L, D303R/F465R/S469K/T826F/F840L, D303R/S469K/K516P/T826F/F840L, or combinations thereof, provided that the variant ERCAS12A provides an improvement in CRISPR/ERCAS12A-associated nuclease activity.

[0067] Another embodiment described herein is a nucleic acid encoding a CRISPR-associated protein comprising a polypeptide encoding a variant of ERCAS12A is provided. The variant of ERCAS12A comprises at least one variant amino acid selected from amino acid positions Q18V, 135L, G39K, G39Q, 140Q, D56P, D56R, D59A, D59R, S158G, K165Y, S181V, A290K, D291N, V296R, P297F, P297R, P297V, D303C, D303R, E305K, Y307K, Q353R, L444W, F465R, S469K, V470K, 1498K, Y507R, Y507S, Y507W, Q510K, Q510V, Q510Y, P512G, P512V, Y513G, Y513L, Y513R, Y513S, S514P, S514R, T515P, K516P, K516R, K517P, 1518P, L520M, F522A, A541V, G553M, N556E, N556R, D5621, D562K, D562V, N583V, L585K, F653R, K712R, N716R, E731P, N732T, A744N, A744P, A744T, F748A, S751A, K754G, 1757K, 1757W, E771R, N787A, A825R, T826F, T826K, Y832R, Y836K, Y836Q, Y839L, F840L, Y9071, Y907V, Q916Y, E935R, 1936R, K974G, K1019V, 135L/S469K, 135L/T826F, 140Q/S469K, 140Q/T826F, S469K/T826F, S469K/K516P, Y513G/F840L, Y513G/Y832R, 135L/S469K/T826F, 140Q/S469K/T826F, S469K/K516P/T826F, S469K/T826F/F840L, D303R/S469K/T826F/F840L, F465R/S469K/T826F/F840L, D303R/F465R/S469K/T826F/F840L, D303R/S469K/K516P/T826F/F840L, or combinations thereof, provided that the variant ERCAS12A provides an improvement in CRISPR/ERCAS12A-associated nuclease activity.

[0068] Another embodiment described herein is a polynucleotide sequence encoding a ERCAS12A variant. The polynucleotide sequence comprises a nucleotide sequence having at least 90-99% identity of any one of the odd numbered sequences of SEQ ID NO: 3-209 (e.g., SEQ ID NO: 3, 5, 7 . . . 207, or 209). In one aspect, polynucleotide sequence comprises any one of the odd numbered sequences of SEQ ID NO: 3-209 (e.g., SEQ ID NO: 3, 5, 7 . . . 207, or 209).

[0069] Another embodiment described herein is CAS endonuclease system comprising an expression cassette encoding a polynucleotide sequence encoding a ERCAS12A polypeptide is provided. The polynucleotide sequence comprises a nucleotide sequence having at least 90-99% identity of any one of the odd numbered sequences of SEQ ID NO: 3-209 (e.g., 3, 5, 7 . . . 207, or 209). In one aspect, polynucleotide sequence comprises any one of the odd numbered sequences of SEQ ID NO: 3-209 (e.g., 3, 5, 7 . . . 207, or 209).

[0070] Another embodiment described herein is a CAS endonuclease system comprising an amino acid sequence encoding a ERCAS12A polypeptide. The amino acid sequence includes a polypeptide comprising a ERCAS12A variant selected from a polypeptide having one or more amino acid substitutions presented in Table 1 relative to wild type ERCAS12A (SEQ ID NO: 2), wherein the ERCAS12A variant displays improved genome editing relative to wild type ERCAS12A (SEQ ID NO: 2).

[0071] Another embodiment described herein is a method of performing genome editing in eukaryotic cells. The method includes the step of introducing an CAS endonuclease system into the eukaryotic cell, said CAS endonuclease system comprising an expression cassette encoding a polynucleotide sequence encoding a ERCAS12A polypeptide, comprising a ERCAS12A variant selected from a polypeptide having one or more amino acid substitutions presented in Table 1 relative to wild type ERCAS12A (SEQ ID NO: 2), wherein the ERCAS12A variant displays improved genome editing relative to wild type ERCAS12A (SEQ ID NO: 2).

[0072] Another embodiment described herein is a method of performing genome editing in a eukaryotic cell. The method includes the step of introducing an CAS endonuclease system into the eukaryotic cell, said CAS endonuclease system comprising an amino acid sequence encoding a ERCAS12A polypeptide comprising a ERCAS12A variant selected from a polypeptide having one or more amino acid substitutions presented in Table 1 relative to wild type ERCAS12A (SEQ ID NO: 2), wherein the ERCAS12A variant displays improved genome editing relative to wild type ERCAS12A (SEQ ID NO: 2) Another embodiment described herein is an CRISPR-associated protein comprising a fusion polypeptide. The fusion polypeptide includes an ERCAS12A open reading frame, a nuclear localization signal, optionally an amino acid linker and optionally an affinity tag.

[0073] Another embodiment described herein is a method of performing genome editing in a eukaryotic cell. The method includes the step of introducing an CAS endonuclease system into the eukaryotic cell, said CAS endonuclease system comprising a CRISPR-associated protein.

[0074] Another embodiment is a polypeptide encoded by a nucleotide sequence described herein. In one aspect, the polypeptide has at least 85% to 99% identity to the even numbered sequences of SEQ ID NO: 4-210 (e.g., SEQ ID NO: 4, 6, 8 . . . 206, or 210). In another aspect, the polypeptide is selected from the even numbered sequences of SEQ ID NO: 4-210 (e.g., SEQ ID NO: 4, 6, 8 . . . 206, or 210).

[0075] Another embodiment described herein is a process for manufacturing one or more of the nucleotide sequence described herein or a polypeptide encoded by the nucleotide sequence described herein, the process comprising: transforming or transfecting a cell with a nucleic acid comprising a nucleotide sequence described herein; growing the cells; optionally isolating additional quantities of a nucleotide sequence described herein; inducing expression of a polypeptide encoded by a nucleotide sequence of described herein; isolating the polypeptide encoded by a nucleotide described herein.

[0076] Another embodiment described herein is a means for manufacturing one or more of the nucleotide sequences described herein or a polypeptide encoded by a nucleotide sequence described herein, the process comprising: transforming or transfecting a cell with a nucleic acid comprising a nucleotide sequence described herein; growing the cells; optionally isolating additional quantities of a nucleotide sequence described herein; inducing expression of a polypeptide encoded by a nucleotide sequence of described herein; isolating the polypeptide encoded by a nucleotide described herein.

[0077] Another embodiment described herein is a nucleotide sequence or a polypeptide encoded by the nucleotide sequence produced by the methods or the means described herein.

[0078] Another embodiment described herein is the use of an effective amount of a polypeptide encoded by one or more of the odd numbered sequences of SEQ ID NO: 3-209 (e.g., 3, 5, 7 . . . 207, or 209).

[0079] Another embodiment described herein is a research tool comprising a polypeptide encoded by a nucleotide sequence described herein.

[0080] Another embodiment described herein is a reagent comprising a polypeptide encoded by a nucleotide sequence described herein.

[0081] The polynucleotides described herein include variants that have substitutions, deletions, and/or additions that can involve one or more nucleotides. The variants can be altered in coding regions, non-coding regions, or both. Alterations in the coding regions can produce conservative or non-conservative amino acid substitutions, deletions, or additions. Especially preferred among these are silent substitutions, additions, and deletions, which do not alter the properties and activities of the binding.

[0082] Further embodiments described herein include nucleic acid molecules comprising polynucleotides having nucleotide sequences at least about 50%, 55%, 60%, 65%, 70%, 75%, 80%, 85%, 90%, 91%, 92%, 93%, 94%, 95%, 96%, 97%, 98%, or 99% identical, and more preferably at least about 90-99% or 100% identical to (a) nucleotide sequences, or degenerate, homologous, or codon-optimized variants thereof, encoding polypeptides having the amino acid sequences in the even numbered sequences of SEQ ID NO: 4-210 (e.g., SEQ ID NO: 4, 6, 8 . . . 206, or 210); (b) nucleotide sequences, or degenerate, homologous, or codon-optimized variants thereof, encoding polypeptides having the amino acid sequences in the even numbered sequences of SEQ ID NO: 4-210 (e.g., SEQ ID NO: 4, 6, 8 . . . 206, or 210); and (c) nucleotide sequences capable of hybridizing to the complement of any of the nucleotide sequences in (a) or (b) above and capable of expressing functional polypeptides of amino acid sequences the even numbered sequences of SEQ ID NO: 4-210 (e.g., SEQ ID NO: 4, 6, 8 . . . 206, or 210).

[0083] By a polynucleotide having a nucleotide sequence at least, for example, 90-99% “identical” to a reference nucleotide sequence encoding the odd numbered sequences of SEQ ID NO: 3-209 (e.g., 3, 5, 7 . . . 207, or 209) is intended that the nucleotide sequence of the polynucleotide be identical to the reference sequence except that the polynucleotide sequence can include up to about 10 to 1 point mutations, additions, or deletions per each 100 nucleotides of the reference nucleotide sequence encoding the odd numbered sequences of SEQ ID NO: 3-209 (e.g., 3, 5, 7 . . . 207, or 209).

[0084] In other words, to obtain a polynucleotide having a nucleotide sequence about at least 90-99% identical to a reference nucleotide sequence, up to 10% of the nucleotides in the reference sequence can be deleted, added, or substituted, with another nucleotide, or a number of nucleotides up to 10% of the total nucleotides in the reference sequence can be inserted into the reference sequence. These mutations of the reference sequence can occur at the 5′- or 3′-terminal positions of the reference nucleotide sequence or anywhere between those terminal positions, interspersed either individually among nucleotides in the reference sequence or in one or more contiguous groups within the reference sequence. The same is applicable to polypeptide sequences at least about 90-99% identical to a reference polypeptide sequence.

[0085] As noted above, two or more polynucleotide sequences can be compared by determining their percent identity. Two or more amino acid sequences likewise can be compared by determining their percent identity. The percent identity of two sequences, whether nucleic acid or peptide sequences, is generally described as the number of exact matches between two aligned sequences divided by the length of the shorter sequence and multiplied by 100. An approximate alignment for nucleic acid sequences is provided by the local homology algorithm of Smith and Waterman, Advances in Applied Mathematics 2: 4 82-489 (1981). This algorithm can be extended to use with peptide sequences using the scoring matrix developed by Dayhoff, Atlas of Protein Sequences and Structure, M. O. Dayhoff ed., 5 suppl. 3: 353-358, National Biomedical Research Foundation, Washington, D.C., USA, and normalized by Gribskov, Nucl. Acids Res. 14(6): 6745-6763 (1986).

[0086] For example, due to the degeneracy of the genetic code, one having ordinary skill in the art will recognize that a large number of the nucleic acid molecules having a sequence at least about 50%, 55%, 60%, 65%, 70%, 75%, 80%, 85%, 90%, 91%, 92%, 93%, 94%, 95%, 96%, 97%, 98%, 99%, or 100% identical to the nucleic acid sequence shown in the odd numbered sequences of SEQ ID NO: 3-209 (e.g., 3, 5, 7 . . . 207, or 209), or degenerate, homologous, or codon-optimized variants thereof, will encode the even numbered sequences of SEQ ID NO: 4-210 (e.g., SEQ ID NO: 4, 6, 8 . . . 206, or 210).

[0087] The polynucleotides described herein include those encoding mutations, variations, substitutions, additions, deletions, and particular examples of the polypeptides described herein. For example, guidance concerning how to make phenotypically silent amino acid substitutions is provided in Bowie, J. U. et al., “Deciphering the Message in Protein Sequences: Tolerance to Amino Acid Substitutions,” Science 247: 1306-1310 (1990), wherein the authors indicate that proteins are surprisingly tolerant of amino acid substitutions.

[0088] Thus, fragments, derivatives, or analogs of the polypeptides of the even numbered sequences of SEQ ID NO: 4-210 (e.g., SEQ ID NO: 4, 6, 8 . . . 206, or 210) can be (i) ones in which one or more of the amino acid residues (e.g., 1, 2, 3, 4, 5, 7, 8, 9, 10, 11, 12, 13, 14, 15, 16, 17, 18, 19, 20, 25, 30, 35, 40, 45, or 50 residues, or even more) are substituted with a conserved or non-conserved amino acid residue (preferably a conserved amino acid residue). Such substituted amino acid residues may or may not be one encoded by the genetic code, or (ii) ones in which one or more of the amino acid residues includes a substituent group (e.g., 1, 2, 3, 4, 5, 7, 8, 9, 10, 15, 20, 25, 30, 35, 40, 45, or 50 residues or even more), or (iii) ones in which the mature polypeptide is fused with another polypeptide or compound, such as a compound to increase the half-life of the polypeptide (for example, polyethylene glycol), or (iv) ones in which the additional amino acids are fused to the mature polypeptide, such as an IgG Fc fusion region peptide or leader or secretory sequence or a sequence which is employed for purification of the mature polypeptide or a proprotein sequence. Such fragments, derivatives, and analogs are deemed to be within the scope of those skilled in the art from the teachings herein.

[0089] In addition, fragments, derivatives, or analogs of the polypeptides of the even numbered sequences of SEQ ID NO: 4-210 (e.g., SEQ ID NO: 4, 6, 8 . . . 206, or 210) can be substituted with one or more conserved or non-conserved amino acid residue (preferably a conserved amino acid residue). In some cases, these polypeptides, fragments, derivatives, or analogs thereof will have a polypeptide sequence at least about 50%, 55%, 60%, 65%, 70%, 75%, 80%, 85%, 90%, 91%, 92%, 93%, 94%, 95%, 96%, 97%, 98%, 99% or 100% identical to the polypeptide sequence shown in the even numbered sequences of SEQ ID NO: 4-210 (e.g., SEQ ID NO: 4, 6, 8 . . . 206, or 210) and will comprise functional or non-functional proteins or enzymes. Similarly, additions or deletions to the polypeptides can be made either at the N- or C-termini or within non-conserved regions of the polypeptide (which are assumed to be non-critical because they have not been photogenically conserved).

[0090] As described herein, in many cases the amino acid substitutions, mutations, additions, or deletions are preferably of a minor nature, such as conservative amino acid substitutions that do not significantly affect the folding or activity of the protein or additions or deletions to the N- or C-termini. Of course, the number of amino acid substitutions, additions, or deletions a skilled artisan would make depends on many factors, including those described herein. Generally, the number of substitutions, additions, or deletions for any given polypeptide will not be more than about 100, 90, 80, 70, 60, 50, 40, 30, 25, 20, 19, 18, 17, 16, 15, 14, 13, 12, 11, 10, 9, 8, 7, 5, 6, 4, 3, 2, or 1.

[0091] Another embodiment described herein is a polynucleotide vector comprising one or more nucleotide sequences described herein.

[0092] Another embodiment described herein is a cell comprising one or more nucleotide sequences described herein or a polynucleotide vector described herein.

[0093] It will be apparent to one of ordinary skill in the relevant art that suitable modifications and adaptations to the compositions, formulations, methods, processes, apparata, assemblies, and applications described herein can be made without departing from the scope of any embodiments or aspects thereof. The compositions, apparata, assemblies, and methods provided are exemplary and are not intended to limit the scope of any of the disclosed embodiments. All the various embodiments, aspects, and options disclosed herein can be combined in any variations or iterations. The scope of the compositions, formulations, methods, apparata, assemblies, and processes described herein include all actual or potential combinations of embodiments, aspects, options, examples, and preferences described herein. The compositions, formulations, apparata, assemblies, or methods described herein may omit any component or step, substitute any component or step disclosed herein, or include any component or step disclosed elsewhere herein. The ratios of the mass of any component of any of the compositions or formulations disclosed herein to the mass of any other component in the formulation or to the total mass of the other components in the formulation are hereby disclosed as if they were expressly disclosed. Should the meaning of any terms in any of the patents or publications incorporated by reference conflict with the meaning of the terms used in this disclosure, the meanings of the terms or phrases in this disclosure are controlling. All patents and publications cited herein are incorporated by reference herein for the specific teachings thereof.

[0094] Various embodiments and aspects of the inventions described herein are summarized by the following clauses:
[0095] Clause 1. An isolated polypeptide comprising an Eubacterium rectale Cas12a (ERCAS12A) mutant having one or more amino acid substitutions introduced into a wild-type ERCAS12A polypeptide sequence of SEQ ID NO: 2, where the ERCAS12A mutant polypeptide provides an improvement in nuclease activity as compared to the wild-type ERCAS12A polypeptide.
[0096] Clause 2. The isolated polypeptide of clause 1, wherein the ERCAS12A mutant has 98% to 99% identity to a polypeptide sequence selected from the even numbered sequences of SEQ ID NO: 4-210.
[0097] Clause 3. The isolated polypeptide of clause 1 or 2, wherein the ERCAS12A mutant has a polypeptide sequence selected from the even numbered sequences of SEQ ID NO: 4-210.
[0098] Clause 4. The isolated polypeptide of any one of clauses 1-3, wherein the ERCAS12A mutant comprises one or more amino acid substitution at positions 18, 35, 39, 39, 40, 56, 56, 59, 59, 158, 165, 181, 290, 291, 296, 297, 297, 297, 303, 303, 305, 307, 353, 444, 465, 469, 470, 498, 507, 507, 507, 510, 510, 510, 512, 512, 513, 513, 513, 513, 514, 514, 515, 516, 516, 517, 518, 520, 522, 541, 553, 556, 556, 562, 562, 562, 583, 585, 653, 712, 716, 731, 732, 744, 744, 744, 748, 751, 754, 757, 757, 771, 787, 825, 826, 826, 832, 836, 836, 839, 840, 907, 907, 916, 935, 936, 974, or 1019 of the wild-type ERCAS12A polypeptide sequence of SEQ ID NO: 2.
[0099] Clause 5. The isolated polypeptide of any one of clauses 1-4, wherein the ERCAS12A mutant comprises one or more amino acid substitutions selected from Q18V, 135L, G39K, G39Q, 140Q, D56P, D56R, D59A, D59R, S158G, K165Y, S181V, A290K, D291N, V296R, P297F, P297R, P297V, D303C, D303R, E305K, Y307K, Q353R, L444W, F465R, S469K, V470K, 1498K, Y507R, Y507S, Y507W, Q510K, Q510V, Q510Y, P512G, P512V, Y513G, Y513L, Y513R, Y513S, S514P, S514R, T515P, K516P, K516R, K517P, 1518P, L520M, F522A, A541V, G553M, N556E, N556R, D5621, D562K, D562V, N583V, L585K, F653R, K712R, N716R, E731P, N732T, A744N, A744P, A744T, F748A, S751A, K754G, 1757K, 1757W, E771R, N787A, A825R, T826F, T826K, Y832R, Y836K, Y836Q, Y839L, F840L, Y9071, Y907V, Q916Y, E935R, 1936R, K974G, K1019V, or combinations thereof of the wild-type ERCAS12A polypeptide sequence of SEQ ID NO: 2.
[0100] Clause 6. The isolated polypeptide of any one of clauses 1-5, wherein the ERCAS12A mutant is selected from: Q18V (SEQ ID NO: 4); 135L (SEQ ID NO: 6); G39Q (SEQ ID NO: 8); G39K (SEQ ID NO: 10); 140Q (SEQ ID NO: 12); D56R (SEQ ID NO: 14); D56P (SEQ ID NO: 16); D59R (SEQ ID NO: 18); D59A (SEQ ID NO: 20); S158G (SEQ ID NO: 22); K165Y (SEQ ID NO: 24); S181V (SEQ ID NO: 26); A290K (SEQ ID NO: 28); D291 N (SEQ ID NO: 30); V296R (SEQ ID NO: 32); P297V (SEQ ID NO: 34); P297R (SEQ ID NO: 36); P297F (SEQ ID NO: 38); D303R (SEQ ID NO: 40); D303C (SEQ ID NO: 42); E305K (SEQ ID NO: 44); Y307K (SEQ ID NO: 46); Q353R (SEQ ID NO: 48); L444W (SEQ ID NO: 50); F465R (SEQ ID NO: 52); S469K (SEQ ID NO: 54); V470K (SEQ ID NO: 56); 1498K (SEQ ID NO: 58); Y507W (SEQ ID NO: 60); Y507S (SEQ ID NO: 62); Y507R (SEQ ID NO: 64); Q510Y (SEQ ID NO: 66); Q510V (SEQ ID NO: 68); Q510K (SEQ ID NO: 70); P512V (SEQ ID NO: 72); P512G (SEQ ID NO: 74); Y513S (SEQ ID NO: 76); Y513R (SEQ ID NO: 78); Y513L (SEQ ID NO: 80); Y513G (SEQ ID NO: 82); S514R (SEQ ID NO: 84); S514P (SEQ ID NO: 86); T515P (SEQ ID NO: 88); K516R (SEQ ID NO: 90); K516P (SEQ ID NO: 92); K517P (SEQ ID NO: 94); 1518P (SEQ ID NO: 96); L520M (SEQ ID NO: 98); F522A (SEQ ID NO: 100); A541V (SEQ ID NO: 102); G553M (SEQ ID NO: 104); N556R (SEQ ID NO: 106); N556E (SEQ ID NO: 108); D562V (SEQ ID NO: 110); D562K (SEQ ID NO: 112); D5621 (SEQ ID NO: 114); N583V (SEQ ID NO: 116); L585K (SEQ ID NO: 118); F653R (SEQ ID NO: 120); K712R (SEQ ID NO: 122); N716R (SEQ ID NO: 124); E731P (SEQ ID NO: 126); N732T (SEQ ID NO: 128); A744T (SEQ ID NO: 130); A744P (SEQ ID NO: 132); A744N (SEQ ID NO: 134); F748A (SEQ ID NO: 136); S751A (SEQ ID NO: 138); K754G (SEQ ID NO: 140); 1757W (SEQ ID NO: 142); 1757K (SEQ ID NO: 144); E771R (SEQ ID NO: 146); N787A (SEQ ID NO: 148); A825R (SEQ ID NO: 150); T826K (SEQ ID NO: 152); T826F (SEQ ID NO: 154); Y832R (SEQ ID NO: 156); Y836Q (SEQ ID NO: 158); Y836K (SEQ ID NO: 160); Y839L (SEQ ID NO: 162); F840L (SEQ ID NO: 164); Y907V (SEQ ID NO: 166); Y9071 (SEQ ID NO: 168); Q916Y (SEQ ID NO: 170); E935R (SEQ ID NO: 172); 1936R (SEQ ID NO: 174); K974G (SEQ ID NO: 176); K1019V (SEQ ID NO: 178); 135L/S469K (SEQ ID NO: 180); 135L/T826F (SEQ ID NO: 182); 140Q/S469K (SEQ ID NO: 184); 140Q/T826F (SEQ ID NO: 186); S469K/K516P (SEQ ID NO: 188); S469K/T826F (SEQ ID NO: 190); Y513G/Y832R (SEQ ID NO: 192); Y513G/F840L (SEQ ID NO: 194); 135L/S469K/T826F (SEQ ID NO: 196); 140Q/S469K/T826F (SEQ ID NO: 198); S469K/K516P/T826F (SEQ ID NO: 200); S469K/T826F/F840L (SEQ ID NO: 202); D303R/S469K/T826F/F840L (SEQ ID NO: 204); F465R/S469K/T826F/F840L (SEQ ID NO: 206); D303R/F465R/S469K/T826F/F840L (SEQ ID NO: 208); or D303R/S469K/K516P/T826F/F840L (SEQ ID NO: 210).
[0101] Clause 7. The isolated polypeptide of any one of clauses 1-6, wherein the ERCAS12A mutant is selected from D303R/S469K/T826F/F840L (SEQ ID NO: 204); F465R/S469K/T826F/F840L (SEQ ID NO: 206); D303R/F465R/S469K/T826F/F840L (SEQ ID NO: 208); or D303R/S469K/K516P/T826F/F840L (SEQ ID NO: 210).
[0102] Clause 8. An isolated polynucleotide sequence encoding an Eubacterium rectale Cas12a (ERCAS12A) mutant having one or more amino acid substitutions introduced into a wild-type ERCAS12A polypeptide sequence of SEQ ID NO: 2, where the ERCAS12A mutant provides improved gene editing as compared to the wild-type ERCAS12A polypeptide.
[0103] Clause 9. The isolated polynucleotide sequence of clause 8, wherein the encoded ERCAS12A mutant has 98% to 99% identity to a polypeptide sequence selected from the even numbered sequences of SEQ ID NO: 4-210.
[0104] Clause 10. The isolated polynucleotide sequence of clause 8 or 9, wherein the encoded ERCAS12A mutant has a polypeptide sequence selected from the even numbered sequences of SEQ ID NO: 4-210.
[0105] Clause 11. The isolated polynucleotide sequence of any one of clauses 8-10, wherein the ERCAS12A mutant polynucleotide sequence has 95% to 99% identity to a nucleotide sequence selected from the odd numbered sequences of SEQ ID NO: 3-209.
[0106] Clause 12. The isolated polynucleotide sequence of any one of clauses 8-11, wherein the ERCAS12A mutant polynucleotide has a nucleotide sequence selected from the odd numbered sequences of SEQ ID NO: 3-209.
[0107] Clause 13. The isolated polynucleotide sequence of any one of clauses 8-12, wherein the encoded ERCAS12A mutant comprises one or more amino acid substitution at positions 18, 35, 39, 39, 40, 56, 56, 59, 59, 158, 165, 181, 290, 291, 296, 297, 297, 297, 303, 303, 305, 307, 353, 444, 465, 469, 470, 498, 507, 507, 507, 510, 510, 510, 512, 512, 513, 513, 513, 513, 514, 514, 515, 516, 516, 517, 518, 520, 522, 541, 553, 556, 556, 562, 562, 562, 583, 585, 653, 712, 716, 731, 732, 744, 744, 744, 748, 751, 754, 757, 757, 771, 787, 825, 826, 826, 832, 836, 836, 839, 840, 907, 907, 916, 935, 936, 974, or 1019 of the wild-type ERCAS12A polypeptide sequence of SEQ ID NO: 2.
[0108] Clause 14. The isolated polynucleotide sequence of any one of clauses 8-13, wherein the encoded ERCAS12A mutant comprises one or more amino acid substitutions selected from Q18V, 135L, G39K, G39Q, 140Q, D56P, D56R, D59A, D59R, S158G, K165Y, S181V, A290K, D291N, V296R, P297F, P297R, P297V, D303C, D303R, E305K, Y307K, Q353R, L444W, F465R, S469K, V470K, 1498K, Y507R, Y507S, Y507W, Q510K, Q510V, Q510Y, P512G, P512V, Y513G, Y513L, Y513R, Y513S, S514P, S514R, T515P, K516P, K516R, K517P, 1518P, L520M, F522A, A541V, G553M, N556E, N556R, D5621, D562K, D562V, N583V, L585K, F653R, K712R, N716R, E731P, N732T, A744N, A744P, A744T, F748A, S751A, K754G, 1757K, 1757W, E771R, N787A, A825R, T826F, T826K, Y832R, Y836K, Y836Q, Y839L, F840L, Y9071, Y907V, Q916Y, E935R, 1936R, K974G, K1019V, or combinations thereof of the wild-type ERCAS12A polypeptide sequence of SEQ ID NO: 2.
[0109] Clause 15. The isolated polynucleotide sequence of any one of clauses 8-14, wherein encoded ERCAS12A mutant polynucleotide is selected from is selected from: Q18V (SEQ ID NO: 4); 135L (SEQ ID NO: 6); G39Q (SEQ ID NO: 8); G39K (SEQ ID NO: 10); 140Q (SEQ ID NO: 12); D56R (SEQ ID NO: 14); D56P (SEQ ID NO: 16); D59R (SEQ ID NO: 18); D59A (SEQ ID NO: 20); S158G (SEQ ID NO: 22); K165Y (SEQ ID NO: 24); S181V (SEQ ID NO: 26); A290K (SEQ ID NO: 28); D291N (SEQ ID NO: 30); V296R (SEQ ID NO: 32); P297V (SEQ ID NO: 34); P297R (SEQ ID NO: 36); P297F (SEQ ID NO: 38); D303R (SEQ ID NO: 40); D303C (SEQ ID NO: 42); E305K (SEQ ID NO: 44); Y307K (SEQ ID NO: 46); Q353R (SEQ ID NO: 48); L444W (SEQ ID NO: 50); F465R (SEQ ID NO: 52); S469K (SEQ ID NO: 54); V470K (SEQ ID NO: 56); 1498K (SEQ ID NO: 58); Y507W (SEQ ID NO: 60); Y507S (SEQ ID NO: 62); Y507R (SEQ ID NO: 64); Q510Y (SEQ ID NO: 66); Q510V (SEQ ID NO: 68); Q510K (SEQ ID NO: 70); P512V (SEQ ID NO: 72); P512G (SEQ ID NO: 74); Y513S (SEQ ID NO: 76); Y513R (SEQ ID NO: 78); Y513L (SEQ ID NO: 80); Y513G (SEQ ID NO: 82); S514R (SEQ ID NO: 84); S514P (SEQ ID NO: 86); T515P (SEQ ID NO: 88); K516R (SEQ ID NO: 90); K516P (SEQ ID NO: 92); K517P (SEQ ID NO: 94); 1518P (SEQ ID NO: 96); L520M (SEQ ID NO: 98); F522A (SEQ ID NO: 100); A541V (SEQ ID NO: 102); G553M (SEQ ID NO: 104); N556R (SEQ ID NO: 106); N556E (SEQ ID NO: 108); D562V (SEQ ID NO: 110); D562K (SEQ ID NO: 112); D5621 (SEQ ID NO: 114); N583V (SEQ ID NO: 116); L585K (SEQ ID NO: 118); F653R (SEQ ID NO: 120); K712R (SEQ ID NO: 122); N716R (SEQ ID NO: 124); E731P (SEQ ID NO: 126); N732T (SEQ ID NO: 128); A744T (SEQ ID NO: 130); A744P (SEQ ID NO: 132); A744N (SEQ ID NO: 134); F748A (SEQ ID NO: 136); S751A (SEQ ID NO: 138); K754G (SEQ ID NO: 140); 1757W (SEQ ID NO: 142); 1757K (SEQ ID NO: 144); E771R (SEQ ID NO: 146); N787A (SEQ ID NO: 148); A825R (SEQ ID NO: 150); T826K (SEQ ID NO: 152); T826F (SEQ ID NO: 154); Y832R (SEQ ID NO: 156); Y836Q (SEQ ID NO: 158); Y836K (SEQ ID NO: 160); Y839L (SEQ ID NO: 162); F840L (SEQ ID NO: 164); Y907V (SEQ ID NO: 166); Y9071 (SEQ ID NO: 168); Q916Y (SEQ ID NO: 170); E935R (SEQ ID NO: 172); 1936R (SEQ ID NO: 174); K974G (SEQ ID NO: 176); K1019V (SEQ ID NO: 178); 135L/S469K (SEQ ID NO: 180); 135L/T826F (SEQ ID NO: 182); 140Q/S469K (SEQ ID NO: 184); 140Q/T826F (SEQ ID NO: 186); S469K/K516P (SEQ ID NO: 188); S469K/T826F (SEQ ID NO: 190); Y513G/Y832R (SEQ ID NO: 192); Y513G/F840L (SEQ ID NO: 194); 135L/S469K/T826F (SEQ ID NO: 196); 140Q/S469K/T826F (SEQ ID NO: 198); S469K/K516P/T826F (SEQ ID NO: 200); S469K/T826F/F840L (SEQ ID NO: 202); D303R/S469K/T826F/F840L (SEQ ID NO: 204); F465R/S469K/T826F/F840L (SEQ ID NO: 206); D303R/F465R/S469K/T826F/F840L (SEQ ID NO: 208); or D303R/S469K/K516P/T826F/F840L (SEQ ID NO: 210).
[0110] Clause 16. The isolated polynucleotide sequence of any one of clauses 8-15, wherein the ERCAS12A mutant poly nucleotide is selected from Q18V (SEQ ID NO: 3); 135L (SEQ ID NO: 5); G39Q (SEQ ID NO: 7); G39K (SEQ ID NO: 9); 140Q (SEQ ID NO: 11); D56R (SEQ ID NO: 13); D56P (SEQ ID NO: 15); D59R (SEQ ID NO: 17); D59A (SEQ ID NO: 19); S158G (SEQ ID NO: 21); K165Y (SEQ ID NO: 23); S181V (SEQ ID NO: 25); A290K (SEQ ID NO: 27); D291N (SEQ ID NO: 29); V296R (SEQ ID NO: 31); P297V (SEQ ID NO: 33); P297R (SEQ ID NO: 35); P297F (SEQ ID NO: 37); D303R (SEQ ID NO: 39); D303C (SEQ ID NO: 41); E305K (SEQ ID NO: 43); Y307K (SEQ ID NO: 45); Q353R (SEQ ID NO: 47); L444W (SEQ ID NO: 49); F465R (SEQ ID NO: 51); S469K (SEQ ID NO: 53); V470K (SEQ ID NO: 55); 1498K (SEQ ID NO: 57); Y507W (SEQ ID NO: 59); Y507S (SEQ ID NO: 61); Y507R (SEQ ID NO: 63); Q510Y (SEQ ID NO: 65); Q510V (SEQ ID NO: 67); Q51OK (SEQ ID NO: 69); P512V (SEQ ID NO: 71); P512G (SEQ ID NO: 73); Y513S (SEQ ID NO: 75); Y513R (SEQ ID NO: 77); Y513L (SEQ ID NO: 79); Y513G (SEQ ID NO: 81); S514R (SEQ ID NO: 83); S514P (SEQ ID NO: 85); T515P (SEQ ID NO: 87); K516R (SEQ ID NO: 89); K516P (SEQ ID NO: 91); K517P (SEQ ID NO: 93); 1518P (SEQ ID NO: 95); L520M (SEQ ID NO: 97); F522A (SEQ ID NO: 99); A541V (SEQ ID NO: 101); G553M (SEQ ID NO: 103); N556R (SEQ ID NO: 105); N556E (SEQ ID NO: 107); D562V (SEQ ID NO: 109); D562K (SEQ ID NO: 111); D5621 (SEQ ID NO: 113); N583V (SEQ ID NO: 115); L585K (SEQ ID NO: 117); F653R (SEQ ID NO: 119); K712R (SEQ ID NO: 121); N716R (SEQ ID NO: 123); E731P (SEQ ID NO: 125); N732T (SEQ ID NO: 127); A744T (SEQ ID NO: 129); A744P (SEQ ID NO: 131); A744N (SEQ ID NO: 132); F748A (SEQ ID NO: 135); S751A (SEQ ID NO: 137); K754G (SEQ ID NO: 139); 1757W (SEQ ID NO: 141); 1757K (SEQ ID NO: 143); E771R (SEQ ID NO: 145); N787A (SEQ ID NO: 147); A825R (SEQ ID NO: 149); T826K (SEQ ID NO: 151); T826F (SEQ ID NO: 153); Y832R (SEQ ID NO: 155); Y836Q (SEQ ID NO: 157); Y836K (SEQ ID NO: 159); Y839L (SEQ ID NO: 161); F840L (SEQ ID NO: 163); Y907V (SEQ ID NO: 165); Y9071 (SEQ ID NO: 167); Q916Y (SEQ ID NO: 169); E935R (SEQ ID NO: 171); 1936R (SEQ ID NO: 173); K974G (SEQ ID NO: 175); K1019V (SEQ ID NO: 177); 135L/S469K (SEQ ID NO: 179); 135L/T826F (SEQ ID NO: 181); 140Q/S469K (SEQ ID NO: 183); 140Q/T826F (SEQ ID NO: 185); S469K/K516P (SEQ ID NO: 187); S469K/T826F (SEQ ID NO: 189); Y513G/Y832R (SEQ ID NO: 191); Y513G/F840L (SEQ ID NO: 193); 135L/S469K/T826F (SEQ ID NO: 195); 140Q/S469K/T826F (SEQ ID NO: 197); S469K/K516P/T826F (SEQ ID NO: 199); S469K/T826F/F840L (SEQ ID NO: 201); D303R/S469K/T826F/F840L (SEQ ID NO: 203); F465R/S469K/T826F/F840L (SEQ ID NO: 205); D303R/F465R/S469K/T826F/F840L (SEQ ID NO: 207); or D303R/S469K/K516P/T826F/F840L (SEQ ID NO: 209).
[0111] Clause 17. The isolated polynucleotide sequence of any one of clauses 8-16, wherein the ERCAS12A mutant polynucleotide is selected from is selected from: D303R/S469K/T826F/F840L (SEQ ID NO: 203); F465R/S469K/T826F/F840L (SEQ ID NO: 205); D303R/F465R/S469K/T826F/F840L (SEQ ID NO: 207); or D303R/S469K/K516P/T826F/F840L (SEQ ID NO: 209).
[0112] Clause 18. A vector or plasmid comprising the polynucleotide sequence of any one of clauses 8-17.
[0113] Clause 19. A cell comprising a nucleic acid comprising one or more of the polynucleotide sequences of any one of clauses 8-18.
[0114] Clause 20. An isolated CRISPR ribonucleoprotein complex comprising a guide RNA and a ERCAS12A mutant polypeptide having one or more amino acid substitutions introduced into a wild-type ERCAS12A polypeptide sequence of SEQ ID NO: 2, where the ERCAS12A mutant provides improved gene editing as compared to the wild-type ERCAS12A polypeptide.
[0115] Clause 21. The isolated CRISPR ribonucleoprotein complex of clause 20, wherein the ERCAS12A mutant has a polypeptide sequence selected from the even numbered sequences of SEQ ID NO: 4-210.
[0116] Clause 22. The isolated CRISPR ribonucleoprotein complex of clause 20 or 21, wherein the ERCAS12A mutant comprises one or more amino acid substitution at positions 18, 35, 39, 39, 40, 56, 56, 59, 59, 158, 165, 181, 290, 291, 296, 297, 297, 297, 303, 303, 305, 307, 353, 444, 465, 469, 470, 498, 507, 507, 507, 510, 510, 510, 512, 512, 513, 513, 513, 513, 514, 514, 515, 516, 516, 517, 518, 520, 522, 541, 553, 556, 556, 562, 562, 562, 583, 585, 653, 712, 716, 731, 732, 744, 744, 744, 748, 751, 754, 757, 757, 771, 787, 825, 826, 826, 832, 836, 836, 839, 840, 907, 907, 916, 935, 936, 974, or 1019 of the wild-type ERCAS12A polypeptide sequence of SEQ ID NO: 2.
[0117] Clause 23. The isolated CRISPR ribonucleoprotein complex of any one of clauses 20-22, wherein the ERCAS12A mutant comprises one or more amino acid substitutions selected from Q18V, 135L, G39K, G39Q, 140Q, D56P, D56R, D59A, D59R, S158G, K165Y, S181V, A290K, D291N, V296R, P297F, P297R, P297V, D303C, D303R, E305K, Y307K, Q353R, L444W, F465R, S469K, V470K, 1498K, Y507R, Y507S, Y507W, Q510K, Q510V, Q510Y, P512G, P512V, Y513G, Y513L, Y513R, Y513S, S514P, S514R, T515P, K516P, K516R, K517P, 1518P, L520M, F522A, A541V, G553M, N556E, N556R, D5621, D562K, D562V, N583V, L585K, F653R, K712R, N716R, E731P, N732T, A744N, A744P, A744T, F748A, S751A, K754G, 1757K, 1757W, E771R, N787A, A825R, T826F, T826K, Y832R, Y836K, Y836Q, Y839L, F840L, Y9071, Y907V, Q916Y, E935R, 1936R, K974G, K1019V, or combinations thereof of the wild-type ERCAS12A polypeptide sequence of SEQ ID NO: 2.
[0118] Clause 24. The isolated CRISPR ribonucleoprotein complex of any one of clauses 20-23, wherein the ERCAS12A mutant is selected from: Q18V (SEQ ID NO: 4); 135L (SEQ ID NO: 6); G39Q (SEQ ID NO: 8); G39K (SEQ ID NO: 10); 140Q (SEQ ID NO: 12); D56R (SEQ ID NO: 14); D56P (SEQ ID NO: 16); D59R (SEQ ID NO: 18); D59A (SEQ ID NO: 20); S158G (SEQ ID NO: 22); K165Y (SEQ ID NO: 24); S181V (SEQ ID NO: 26); A290K (SEQ ID NO: 28); D291N (SEQ ID NO: 30); V296R (SEQ ID NO: 32); P297V (SEQ ID NO: 34); P297R (SEQ ID NO: 36); P297F (SEQ ID NO: 38); D303R (SEQ ID NO: 40); D303C (SEQ ID NO: 42); E305K (SEQ ID NO: 44); Y307K (SEQ ID NO: 46); Q353R (SEQ ID NO: 48); L444W (SEQ ID NO: 50); F465R (SEQ ID NO: 52); S469K (SEQ ID NO: 54); V470K (SEQ ID NO: 56); 1498K (SEQ ID NO: 58); Y507W (SEQ ID NO: 60); Y507S (SEQ ID NO: 62); Y507R (SEQ ID NO: 64); Q510Y (SEQ ID NO: 66); Q510V (SEQ ID NO: 68); Q510K (SEQ ID NO: 70); P512V (SEQ ID NO: 72); P512G (SEQ ID NO: 74); Y513S (SEQ ID NO: 76); Y513R (SEQ ID NO: 78); Y513L (SEQ ID NO: 80); Y513G (SEQ ID NO: 82); S514R (SEQ ID NO: 84); S514P (SEQ ID NO: 86); T515P (SEQ ID NO: 88); K516R (SEQ ID NO: 90); K516P (SEQ ID NO: 92); K517P (SEQ ID NO: 94); 1518P (SEQ ID NO: 96); L520M (SEQ ID NO: 98); F522A (SEQ ID NO: 100); A541V (SEQ ID NO: 102); G553M (SEQ ID NO: 104); N556R (SEQ ID NO: 106); N556E (SEQ ID NO: 108); D562V (SEQ ID NO: 110); D562K (SEQ ID NO: 112); D5621 (SEQ ID NO: 114); N583V (SEQ ID NO: 116); L585K (SEQ ID NO: 118); F653R (SEQ ID NO: 120); K712R (SEQ ID NO: 122); N716R (SEQ ID NO: 124); E731P (SEQ ID NO: 126); N732T (SEQ ID NO: 128); A744T (SEQ ID NO: 130); A744P (SEQ ID NO: 132); A744N (SEQ ID NO: 134); F748A (SEQ ID NO: 136); S751A (SEQ ID NO: 138); K754G (SEQ ID NO: 140); 1757W (SEQ ID NO: 142); 1757K (SEQ ID NO: 144); E771R (SEQ ID NO: 146); N787A (SEQ ID NO: 148); A825R (SEQ ID NO: 150); T826K (SEQ ID NO: 152); T826F (SEQ ID NO: 154); Y832R (SEQ ID NO: 156); Y836Q (SEQ ID NO: 158); Y836K (SEQ ID NO: 160); Y839L (SEQ ID NO: 162); F840L (SEQ ID NO: 164); Y907V (SEQ ID NO: 166); Y9071 (SEQ ID NO: 168); Q916Y (SEQ ID NO: 170); E935R (SEQ ID NO: 172); 1936R (SEQ ID NO: 174); K974G (SEQ ID NO: 176); K1019V (SEQ ID NO: 178); 135L/S469K (SEQ ID NO: 180); 135L/T826F (SEQ ID NO: 182); 140Q/S469K (SEQ ID NO: 184); 140Q/T826F (SEQ ID NO: 186); S469K/K516P (SEQ ID NO: 188); S469K/T826F (SEQ ID NO: 190); Y513G/Y832R (SEQ ID NO: 192); Y513G/F840L (SEQ ID NO: 194); 135L/S469K/T826F (SEQ ID NO: 196); 140Q/S469K/T826F (SEQ ID NO: 198); S469K/K516P/T826F (SEQ ID NO: 200); S469K/T826F/F840L (SEQ ID NO: 202); D303R/S469K/T826F/F840L (SEQ ID NO: 204); F465R/S469K/T826F/F840L (SEQ ID NO: 206); D303R/F465R/S469K/T826F/F840L (SEQ ID NO: 208); or D303R/S469K/K516P/T826F/F840L (SEQ ID NO: 210).
[0119] Clause 25. The isolated CRISPR ribonucleoprotein complex of any one of clauses 20-24, wherein the ERCAS12A mutant is selected from D303R/S469K/T826F/F840L (SEQ ID NO: 204); F465R/S469K/T826F/F840L (SEQ ID NO: 206); D303R/F465R/S469K/T826F/F840L (SEQ ID NO: 208); or D303R/S469K/K516P/T826F/F840L (SEQ ID NO: 210).
[0120] Clause 26. An isolated CRISPR/Cpf1 endonuclease system comprising a crRNA and a ERCAS12A mutant polypeptide having one or more amino acid substitutions introduced into a wild-type ERCAS12A polypeptide sequence of SEQ ID NO: 2, where the ERCAS12A mutant polypeptide provides improved genome editing as compared to the wild-type ERCAS12A polypeptide.
[0121] Clause 27. The isolated CRISPR/Cpf1 endonuclease system of clause 26, wherein the ERCAS12A mutant has a polypeptide sequence selected from the even numbered sequences of SEQ ID NO: 4-210.
[0122] Clause 28. The isolated CRISPR/Cpf1 endonuclease system of clause 26 or 27, wherein the ERCAS12A mutant comprises one or more amino acid substitution at positions 18, 35, 39, 39, 40, 56, 56, 59, 59, 158, 165, 181, 290, 291, 296, 297, 297, 297, 303, 303, 305, 307, 353, 444, 465, 469, 470, 498, 507, 507, 507, 510, 510, 510, 512, 512, 513, 513, 513, 513, 514, 514, 515, 516, 516, 517, 518, 520, 522, 541, 553, 556, 556, 562, 562, 562, 583, 585, 653, 712, 716, 731, 732, 744, 744, 744, 748, 751, 754, 757, 757, 771, 787, 825, 826, 826, 832, 836, 836, 839, 840, 907, 907, 916, 935, 936, 974, or 1019 of the wild-type ERCAS12A polypeptide sequence of SEQ ID NO: 2.
[0123] Clause 29. The isolated CRISPR/Cpf1 endonuclease system of any one of clauses 26-28, wherein the ERCAS12A mutant comprises one or more amino acid substitutions selected from Q18V, 135L, G39K, G39Q, 140Q, D56P, D56R, D59A, D59R, S158G, K165Y, S181V, A290K, D291N, V296R, P297F, P297R, P297V, D303C, D303R, E305K, Y307K, Q353R, L444W, F465R, S469K, V470K, 1498K, Y507R, Y507S, Y507W, Q510K, Q510V, Q510Y, P512G, P512V, Y513G, Y513L, Y513R, Y513S, S514P, S514R, T515P, K516P, K516R, K517P, 1518P, L520M, F522A, A541V, G553M, N556E, N556R, D5621, D562K, D562V, N583V, L585K, F653R, K712R, N716R, E731P, N732T, A744N, A744P, A744T, F748A, S751A, K754G, 1757K, 1757W, E771R, N787A, A825R, T826F, T826K, Y832R, Y836K, Y836Q, Y839L, F840L, Y9071, Y907V, Q916Y, E935R, 1936R, K974G, K1019V, or combinations thereof of the wild-type ERCAS12A polypeptide sequence of SEQ ID NO: 2.
[0124] Clause 30. The isolated CRISPR/Cpf1 endonuclease system of any one of clauses 26-29, wherein the ERCAS12A mutant is selected from: Q18V (SEQ ID NO: 4); 135L (SEQ ID NO: 6); G39Q (SEQ ID NO: 8); G39K (SEQ ID NO: 10); 140Q (SEQ ID NO: 12); D56R (SEQ ID NO: 14); D56P (SEQ ID NO: 16); D59R (SEQ ID NO: 18); D59A (SEQ ID NO: 20); S158G (SEQ ID NO: 22); K165Y (SEQ ID NO: 24); S181V (SEQ ID NO: 26); A290K (SEQ ID NO: 28); D291N (SEQ ID NO: 30); V296R (SEQ ID NO: 32); P297V (SEQ ID NO: 34); P297R (SEQ ID NO: 36); P297F (SEQ ID NO: 38); D303R (SEQ ID NO: 40); D303C (SEQ ID NO: 42); E305K (SEQ ID NO: 44); Y307K (SEQ ID NO: 46); Q353R (SEQ ID NO: 48); L444W (SEQ ID NO: 50); F465R (SEQ ID NO: 52); S469K (SEQ ID NO: 54); V470K (SEQ ID NO: 56); 1498K (SEQ ID NO: 58); Y507W (SEQ ID NO: 60); Y507S (SEQ ID NO: 62); Y507R (SEQ ID NO: 64); Q510Y (SEQ ID NO: 66); Q510V (SEQ ID NO: 68); Q510K (SEQ ID NO: 70); P512V (SEQ ID NO: 72); P512G (SEQ ID NO: 74); Y513S (SEQ ID NO: 76); Y513R (SEQ ID NO: 78); Y513L (SEQ ID NO: 80); Y513G (SEQ ID NO: 82); S514R (SEQ ID NO: 84); S514P (SEQ ID NO: 86); T515P (SEQ ID NO: 88); K516R (SEQ ID NO: 90); K516P (SEQ ID NO: 92); K517P (SEQ ID NO: 94); 1518P (SEQ ID NO: 96); L520M (SEQ ID NO: 98); F522A (SEQ ID NO: 100); A541V (SEQ ID NO: 102); G553M (SEQ ID NO: 104); N556R (SEQ ID NO: 106); N556E (SEQ ID NO: 108); D562V (SEQ ID NO: 110); D562K (SEQ ID NO: 112); D5621 (SEQ ID NO: 114); N583V (SEQ ID NO: 116); L585K (SEQ ID NO: 118); F653R (SEQ ID NO: 120); K712R (SEQ ID NO: 122); N716R (SEQ ID NO: 124); E731P (SEQ ID NO: 126); N732T (SEQ ID NO: 128); A744T (SEQ ID NO: 130); A744P (SEQ ID NO: 132); A744N (SEQ ID NO: 134); F748A (SEQ ID NO: 136); S751A (SEQ ID NO: 138); K754G (SEQ ID NO: 140); 1757W (SEQ ID NO: 142); 1757K (SEQ ID NO: 144); E771R (SEQ ID NO: 146); N787A (SEQ ID NO: 148); A825R (SEQ ID NO: 150); T826K (SEQ ID NO: 152); T826F (SEQ ID NO: 154); Y832R (SEQ ID NO: 156); Y836Q (SEQ ID NO: 158); Y836K (SEQ ID NO: 160); Y839L (SEQ ID NO: 162); F840L (SEQ ID NO: 164); Y907V (SEQ ID NO: 166); Y9071 (SEQ ID NO: 168); Q916Y (SEQ ID NO: 170); E935R (SEQ ID NO: 172); 1936R (SEQ ID NO: 174); K974G (SEQ ID NO: 176); K1019V (SEQ ID NO: 178); 135L/S469K (SEQ ID NO: 180); 135L/T826F (SEQ ID NO: 182); 140Q/S469K (SEQ ID NO: 184); 140Q/T826F (SEQ ID NO: 186); S469K/K516P (SEQ ID NO: 188); S469K/T826F (SEQ ID NO: 190); Y513G/Y832R (SEQ ID NO: 192); Y513G/F840L (SEQ ID NO: 194); 135L/S469K/T826F (SEQ ID NO: 196); 140Q/S469K/T826F (SEQ ID NO: 198); S469K/K516P/T826F (SEQ ID NO: 200); S469K/T826F/F840L (SEQ ID NO: 202); D303R/S469K/T826F/F840L (SEQ ID NO: 204); F465R/S469K/T826F/F840L (SEQ ID NO: 206); D303R/F465R/S469K/T826F/F840L (SEQ ID NO: 208); or D303R/S469K/K516P/T826F/F840L (SEQ ID NO: 210).
[0125] Clause 31. The isolated CRISPR/Cpf1 endonuclease system of any one of clauses 26-30, wherein the ERCAS12A mutant is selected from D303R/S469K/T826F/F840L (SEQ ID NO: 204); F465R/S469K/T826F/F840L (SEQ ID NO: 206); D303R/F465R/S469K/T826F/F840L (SEQ ID NO: 208); or D303R/S469K/K516P/T826F/F840L (SEQ ID NO: 210).
[0126] Clause 32. A method for performing gene editing comprising:
   [0127] contacting a candidate editing target site locus with a CRISPR ribonucleoprotein complex comprising a crRNA and an ERCAS12A mutant polypeptide comprising having one or more amino acid substitutions introduced into a wild-type ERCAS12A polypeptide sequence of SEQ ID NO: 2, where the ERCAS12A mutant provides improved gene editing as compared to the wild-type ERCAS12A polypeptide.
[0128] Clause 33. The method of clause 32, wherein the ERCAS12A mutant has a polypeptide sequence selected from the even numbered sequences of SEQ ID NO: 4-210.
[0129] Clause 34. The method of clause 32 or 33, wherein the ERCAS12A mutant comprises ERCAS12A mutant comprises one or more amino acid substitution at positions 18, 35, 39, 39, 40, 56, 56, 59, 59, 158, 165, 181, 290, 291, 296, 297, 297, 297, 303, 303, 305, 307, 353, 444, 465, 469, 470, 498, 507, 507, 507, 510, 510, 510, 512, 512, 513, 513, 513, 513, 514, 514, 515, 516, 516, 517, 518, 520, 522, 541, 553, 556, 556, 562, 562, 562, 583, 585, 653, 712, 716, 731, 732, 744, 744, 744, 748, 751, 754, 757, 757, 771, 787, 825, 826, 826, 832, 836, 836, 839, 840, 907, 907, 916, 935, 936, 974, or 1019 of the wild-type ERCAS12A polypeptide sequence of SEQ ID NO: 2.
[0130] Clause 35. The method of any one of clauses 32-34, wherein the ERCAS12A mutant comprises one or more amino acid substitutions selected from Q18V, 135L, G39K, G39Q, 140Q, D56P, D56R, D59A, D59R, S158G, K165Y, S181V, A290K, D291N, V296R, P297F, P297R, P297V, D303C, D303R, E305K, Y307K, Q353R, L444W, F465R, S469K, V470K, 1498K, Y507R, Y507S, Y507W, Q510K, Q510V, Q510Y, P512G, P512V, Y513G, Y513L, Y513R, Y513S, S514P, S514R, T515P, K516P, K516R, K517P, 1518P, L520M, F522A, A541V, G553M, N556E, N556R, D5621, D562K, D562V, N583V, L585K, F653R, K712R, N716R, E731P, N732T, A744N, A744P, A744T, F748A, S751A, K754G, 1757K, 1757W, E771R, N787A, A825R, T826F, T826K, Y832R, Y836K, Y836Q, Y839L, F840L, Y9071, Y907V, Q916Y, E935R, 1936R, K974G, K1019V, or combinations thereof of the wild-type ERCAS12A polypeptide sequence of SEQ ID NO: 2.
[0131] Clause 36. The method of any one of clauses 32-35, wherein the ERCAS12A mutant is selected from: Q18V (SEQ ID NO: 4); 135L (SEQ ID NO: 6); G39Q (SEQ ID NO: 8); G39K (SEQ ID NO: 10); 140Q (SEQ ID NO: 12); D56R (SEQ ID NO: 14); D56P (SEQ ID NO: 16); D59R (SEQ ID NO: 18); D59A (SEQ ID NO: 20); S158G (SEQ ID NO: 22); K165Y (SEQ ID NO: 24); S181V (SEQ ID NO: 26); A290K (SEQ ID NO: 28); D291N (SEQ ID NO: 30); V296R (SEQ ID NO: 32); P297V (SEQ ID NO: 34); P297R (SEQ ID NO: 36); P297F (SEQ ID NO: 38); D303R (SEQ ID NO: 40); D303C (SEQ ID NO: 42); E305K (SEQ ID NO: 44); Y307K (SEQ ID NO: 46); Q353R (SEQ ID NO: 48); L444W (SEQ ID NO: 50); F465R (SEQ ID NO: 52); S469K (SEQ ID NO: 54); V470K (SEQ ID NO: 56); 1498K (SEQ ID NO: 58); Y507W (SEQ ID NO: 60); Y507S (SEQ ID NO: 62); Y507R (SEQ ID NO: 64); Q510Y (SEQ ID NO: 66); Q510V (SEQ ID NO: 68); Q510K (SEQ ID NO: 70); P512V (SEQ ID NO: 72); P512G (SEQ ID NO: 74); Y513S (SEQ ID NO: 76); Y513R (SEQ ID NO: 78); Y513L (SEQ ID NO: 80); Y513G (SEQ ID NO: 82); S514R (SEQ ID NO: 84); S514P (SEQ ID NO: 86); T515P (SEQ ID NO: 88); K516R (SEQ ID NO: 90); K516P (SEQ ID NO: 92); K517P (SEQ ID NO: 94); 1518P (SEQ ID NO: 96); L520M (SEQ ID NO: 98); F522A (SEQ ID NO: 100); A541V (SEQ ID NO: 102); G553M (SEQ ID NO: 104); N556R (SEQ ID NO: 106); N556E (SEQ ID NO: 108); D562V (SEQ ID NO: 110); D562K (SEQ ID NO: 112); D5621 (SEQ ID NO: 114); N583V (SEQ ID NO: 116); L585K (SEQ ID NO: 118); F653R (SEQ ID NO: 120); K712R (SEQ ID NO: 122); N716R (SEQ ID NO: 124); E731P (SEQ ID NO: 126); N732T (SEQ ID NO: 128); A744T (SEQ ID NO: 130); A744P (SEQ ID NO: 132); A744N (SEQ ID NO: 134); F748A (SEQ ID NO: 136); S751A (SEQ ID NO: 138); K754G (SEQ ID NO: 140); 1757W (SEQ ID NO: 142); 1757K (SEQ ID NO: 144); E771R (SEQ ID NO: 146); N787A (SEQ ID NO: 148); A825R (SEQ ID NO: 150); T826K (SEQ ID NO: 152); T826F (SEQ ID NO: 154); Y832R (SEQ ID NO: 156); Y836Q (SEQ ID NO: 158); Y836K (SEQ ID NO: 160); Y839L (SEQ ID NO: 162); F840L (SEQ ID NO: 164); Y907V (SEQ ID NO: 166); Y9071 (SEQ ID NO: 168); Q916Y (SEQ ID NO: 170); E935R (SEQ ID NO: 172); 1936R (SEQ ID NO: 174); K974G (SEQ ID NO: 176); K1019V (SEQ ID NO: 178); 135L/S469K (SEQ ID NO: 180); 135L/T826F (SEQ ID NO: 182); 140Q/S469K (SEQ ID NO: 184); 140Q/T826F (SEQ ID NO: 186); S469K/K516P (SEQ ID NO: 188); S469K/T826F (SEQ ID NO: 190); Y513G/Y832R (SEQ ID NO: 192); Y513G/F840L (SEQ ID NO: 194); 135L/S469K/T826F (SEQ ID NO: 196); 140Q/S469K/T826F (SEQ ID NO: 198); S469K/K516P/T826F (SEQ ID NO: 200); S469K/T826F/F840L (SEQ ID NO: 202); D303R/S469K/T826F/F840L (SEQ ID NO: 204); F465R/S469K/T826F/F840L (SEQ ID NO: 206); D303R/F465R/S469K/T826F/F840L (SEQ ID NO: 208); or D303R/S469K/K516P/T826F/F840L (SEQ ID NO: 210).
[0132] Clause 37. The method of any one of clauses 32-36, wherein the ERCAS12A mutant is selected from D303R/S469K/T826F/F840L (SEQ ID NO: 204); F465R/S469K/T826F/F840L (SEQ ID NO: 206); D303R/F465R/S469K/T826F/F840L (SEQ ID NO: 208); or D303R/S469K/K516P/T826F/F840L (SEQ ID NO: 210).
[0133] Clause 38. A kit comprising a CRISPR ribonucleoprotein complex comprising a guide RNA and an ERCAS12A mutant polypeptide comprising one or more amino acid substitutions introduced into a wild-type ERCAS12A polypeptide sequence of SEQ ID NO: 2, where the ERCAS12A mutant provides improved gene editing as compared to the wild-type ERCAS12A polypeptide.
[0134] Clause 39. The kit of clause 38, wherein the ERCAS12A mutant has a polypeptide sequence selected from the even numbered sequences of SEQ ID NO: 4-210.
[0135] Clause 40. The kit of clause 38 or 39, wherein the ERCAS12A mutant comprises wherein the ERCAS12A mutant comprises one or more amino acid substitutions selected from Q18V, 135L, G39K, G39Q, 140Q, D56P, D56R, D59A, D59R, S158G, K165Y, S181V, A290K, D291N, V296R, P297F, P297R, P297V, D303C, D303R, E305K, Y307K, Q353R, L444W, F465R, S469K, V470K, 1498K, Y507R, Y507S, Y507W, Q510K, Q510V, Q510Y, P512G, P512V, Y513G, Y513L, Y513R, Y513S, S514P, S514R, T515P, K516P, K516R, K517P, 1518P, L520M, F522A, A541V, G553M, N556E, N556R, D5621, D562K, D562V, N583V, L585K, F653R, K712R, N716R, E731P, N732T, A744N, A744P, A744T, F748A, S751A, K754G, 1757K, 1757W, E771R, N787A, A825R, T826F, T826K, Y832R, Y836K, Y836Q, Y839L, F840L, Y9071, Y907V, Q916Y, E935R, 1936R, K974G, K1019V, or combinations thereof of the wild-type ERCAS12A polypeptide sequence of SEQ ID NO: 2.
[0136] Clause 41. The kit of any one of clauses 38-40, wherein the ERCAS12A mutant is selected from: Q18V (SEQ ID NO: 4); 135L (SEQ ID NO: 6); G39Q (SEQ ID NO: 8); G39K (SEQ ID NO: 10); 140Q (SEQ ID NO: 12); D56R (SEQ ID NO: 14); D56P (SEQ ID NO: 16); D59R (SEQ ID NO: 18); D59A (SEQ ID NO: 20); S158G (SEQ ID NO: 22); K165Y (SEQ ID NO: 24); S181V (SEQ ID NO: 26); A290K (SEQ ID NO: 28); D291N (SEQ ID NO: 30); V296R (SEQ ID NO: 32); P297V (SEQ ID NO: 34); P297R (SEQ ID NO: 36); P297F (SEQ ID NO: 38); D303R (SEQ ID NO: 40); D303C (SEQ ID NO: 42); E305K (SEQ ID NO: 44); Y307K (SEQ ID NO: 46); Q353R (SEQ ID NO: 48); L444W (SEQ ID NO: 50); F465R (SEQ ID NO: 52); S469K (SEQ ID NO: 54); V470K (SEQ ID NO: 56); 1498K (SEQ ID NO: 58); Y507W (SEQ ID NO: 60); Y507S (SEQ ID NO: 62); Y507R (SEQ ID NO: 64); Q510Y (SEQ ID NO: 66); Q510V (SEQ ID NO: 68); Q510K (SEQ ID NO: 70); P512V (SEQ ID NO: 72); P512G (SEQ ID NO: 74); Y513S (SEQ ID NO: 76); Y513R (SEQ ID NO: 78); Y513L (SEQ ID NO: 80); Y513G (SEQ ID NO: 82); S514R (SEQ ID NO: 84); S514P (SEQ ID NO: 86); T515P (SEQ ID NO: 88); K516R (SEQ ID NO: 90); K516P (SEQ ID NO: 92); K517P (SEQ ID NO: 94); 1518P (SEQ ID NO: 96); L520M (SEQ ID NO: 98); F522A (SEQ ID NO: 100); A541V (SEQ ID NO: 102); G553M (SEQ ID NO: 104); N556R (SEQ ID NO: 106); N556E (SEQ ID NO: 108); D562V (SEQ ID NO: 110); D562K (SEQ ID NO: 112); D5621 (SEQ ID NO: 114); N583V (SEQ ID NO: 116); L585K (SEQ ID NO: 118); F653R (SEQ ID NO: 120); K712R (SEQ ID NO: 122); N716R (SEQ ID NO: 124); E731P (SEQ ID NO: 126); N732T (SEQ ID NO: 128); A744T (SEQ ID NO: 130); A744P (SEQ ID NO: 132); A744N (SEQ ID NO: 134); F748A (SEQ ID NO: 136); S751A (SEQ ID NO: 138); K754G (SEQ ID NO: 140); 1757W (SEQ ID NO: 142); 1757K (SEQ ID NO: 144); E771R (SEQ ID NO: 146); N787A (SEQ ID NO: 148); A825R (SEQ ID NO: 150); T826K (SEQ ID NO: 152); T826F (SEQ ID NO: 154); Y832R (SEQ ID NO: 156); Y836Q (SEQ ID NO: 158); Y836K (SEQ ID NO: 160); Y839L (SEQ ID NO: 162); F840L (SEQ ID NO: 164); Y907V (SEQ ID NO: 166); Y9071 (SEQ ID NO: 168); Q916Y (SEQ ID NO: 170); E935R (SEQ ID NO: 172); 1936R (SEQ ID NO: 174); K974G (SEQ ID NO: 176); K1019V (SEQ ID NO: 178); 135L/S469K (SEQ ID NO: 180); 135L/T826F (SEQ ID NO: 182); 140Q/S469K (SEQ ID NO: 184); 140Q/T826F (SEQ ID NO: 186); S469K/K516P (SEQ ID NO: 188); S469K/T826F (SEQ ID NO: 190); Y513G/Y832R (SEQ ID NO: 192); Y513G/F840L (SEQ ID NO: 194); 135L/S469K/T826F (SEQ ID NO: 196); 140Q/S469K/T826F (SEQ ID NO: 198); S469K/K516P/T826F (SEQ ID NO: 200); S469K/T826F/F840L (SEQ ID NO: 202); D303R/S469K/T826F/F840L (SEQ ID NO: 204); F465R/S469K/T826F/F840L (SEQ ID NO: 206); D303R/F465R/S469K/T826F/F840L (SEQ ID NO: 208); or D303R/S469K/K516P/T826F/F840L (SEQ ID NO: 210).
[0137] Clause 42. The kit of any one of clauses 38-41, wherein the ERCAS12A mutant is selected from D303R/S469K/T826F/F840L (SEQ ID NO: 204); F465R/S469K/T826F/F840L (SEQ ID NO: 206); D303R/F465R/S469K/T826F/F840L (SEQ ID NO: 208); or D303R/S469K/K516P/T826F/F840L (SEQ ID NO: 210).
[0138] Clause 43. Use of a ERCAS12A mutant polypeptide for improving gene editing, wherein the ERCAS12A mutant one or more amino acid substitutions introduced into a wild-type ERCAS12A polypeptide sequence of SEQ ID NO: 2, where the ERCAS12A mutant provides improved gene editing as compared to the wild-type ERCAS12A polypeptide.
[0139] Clause 44. The use of clause 43, wherein the ERCAS12A mutant has a polypeptide sequence selected from the even numbered sequences of SEQ ID NO: 4-210.
[0140] Clause 45. The use of clause 43 or 44, wherein the ERCAS12A mutant is selected from: Q18V (SEQ ID NO: 4); 135L (SEQ ID NO: 6); G39Q (SEQ ID NO: 8); G39K (SEQ ID NO: 10); 140Q (SEQ ID NO: 12); D56R (SEQ ID NO: 14); D56P (SEQ ID NO: 16); D59R (SEQ ID NO: 18); D59A (SEQ ID NO: 20); S158G (SEQ ID NO: 22); K165Y (SEQ ID NO: 24); S181V (SEQ ID NO: 26); A290K (SEQ ID NO: 28); D291 N (SEQ ID NO: 30); V296R (SEQ ID NO: 32); P297V (SEQ ID NO: 34); P297R (SEQ ID NO: 36); P297F (SEQ ID NO: 38); D303R (SEQ ID NO: 40); D303C (SEQ ID NO: 42); E305K (SEQ ID NO: 44); Y307K (SEQ ID NO: 46); Q353R (SEQ ID NO: 48); L444W (SEQ ID NO: 50); F465R (SEQ ID NO: 52); S469K (SEQ ID NO: 54); V470K (SEQ ID NO: 56); 1498K (SEQ ID NO: 58); Y507W (SEQ ID NO: 60); Y507S (SEQ ID NO: 62); Y507R (SEQ ID NO: 64); Q510Y (SEQ ID NO: 66); Q510V (SEQ ID NO: 68); Q510K (SEQ ID NO: 70); P512V (SEQ ID NO: 72); P512G (SEQ ID NO: 74); Y513S (SEQ ID NO: 76); Y513R (SEQ ID NO: 78); Y513L (SEQ ID NO: 80); Y513G (SEQ ID NO: 82); S514R (SEQ ID NO: 84); S514P (SEQ ID NO: 86); T515P (SEQ ID NO: 88); K516R (SEQ ID NO: 90); K516P (SEQ ID NO: 92); K517P (SEQ ID NO: 94); 1518P (SEQ ID NO: 96); L520M (SEQ ID NO: 98); F522A (SEQ ID NO: 100); A541V (SEQ ID NO: 102); G553M (SEQ ID NO: 104); N556R (SEQ ID NO: 106); N556E (SEQ ID NO: 108); D562V (SEQ ID NO: 110); D562K (SEQ ID NO: 112); D5621 (SEQ ID NO: 114); N583V (SEQ ID NO: 116); L585K (SEQ ID NO: 118); F653R (SEQ ID NO: 120); K712R (SEQ ID NO: 122); N716R (SEQ ID NO: 124); E731P (SEQ ID NO: 126); N732T (SEQ ID NO: 128); A744T (SEQ ID NO: 130); A744P (SEQ ID NO: 132); A744N (SEQ ID NO: 134); F748A (SEQ ID NO: 136); S751A (SEQ ID NO: 138); K754G (SEQ ID NO: 140); 1757W (SEQ ID NO: 142); 1757K (SEQ ID NO: 144); E771R (SEQ ID NO: 146); N787A (SEQ ID NO: 148); A825R (SEQ ID NO: 150); T826K (SEQ ID NO: 152); T826F (SEQ ID NO: 154); Y832R (SEQ ID NO: 156); Y836Q (SEQ ID NO: 158); Y836K (SEQ ID NO: 160); Y839L (SEQ ID NO: 162); F840L (SEQ ID NO: 164); Y907V (SEQ ID NO: 166); Y9071 (SEQ ID NO: 168); Q916Y (SEQ ID NO: 170); E935R (SEQ ID NO: 172); 1936R (SEQ ID NO: 174); K974G (SEQ ID NO: 176); K1019V (SEQ ID NO: 178); 135L/S469K (SEQ ID NO: 180); 135L/T826F (SEQ ID NO: 182); 140Q/S469K (SEQ ID NO: 184); 140Q/T826F (SEQ ID NO: 186); S469K/K516P (SEQ ID NO: 188); S469K/T826F (SEQ ID NO: 190); Y513G/Y832R (SEQ ID NO: 192); Y513G/F840L (SEQ ID NO: 194); 135L/S469K/T826F (SEQ ID NO: 196); 140Q/S469K/T826F (SEQ ID NO: 198); S469K/K516P/T826F (SEQ ID NO: 200); S469K/T826F/F840L (SEQ ID NO: 202); D303R/S469K/T826F/F840L (SEQ ID NO: 204); F465R/S469K/T826F/F840L (SEQ ID NO: 206); D303R/F465R/S469K/T826F/F840L (SEQ ID NO: 208); or D303R/S469K/K516P/T826F/F840L (SEQ ID NO: 210).

### EXAMPLES

### Example 1

High-Throughput Measurement of DNA Cleavage Activity of ERCAS12A Variants at TTTT PAM Sites in E. coli.

[0141] The following Example demonstrates the ability of the invention to increase the efficiency of gene editing as compared to ERCAS12A (variant of E. rectalis Cas12a). The wild type nucleotide sequence of ERCAS12A (SEQ ID NO: 1) and amino acid sequence (SEQ ID NO: 2) are shown in Table 1.

TABLE 1
ERCAS12A Polynucleotide and Polypeptide
Sequences

Wild Type ERCAS12A Nucleotide Sequence
(SEQ ID NO: 1)
ATGAATAACGGCACCAACAACTTCCAGAACTTTATTGGTATTAGC
AGCCTGCAGAAAACCCTGCGTAATGCACTGATTCCGACCGAAACC
ACACAGCAGTTTATTGTGAAAAACGGCATCATCAAAGAAGATGAA
CTTCGCGGAGAAAATCGCCAGATTCTGAAAGATATCATGGATGAT
TATTATCGCGGTTTTATCAGCGAAACCCTGAGCAGCATTGATGAT
ATTGATTGGACCAGCCTGTTCGAGAAAATGGAAATCCAGCTGAAA
AATGGCGATAACAAAGACACCCTGATTAAAGAACAGGCCGAAAAA
CGTAAAGCCATCTACAAAAAATTCGCCGATGATGACCGCTTTAAA
AACATGTTCAGCGCAAAACTGATTAGCGATATTCTGCCGGAATTT
GTGATCCACAATAATAACTATAGCGCCAGCGAGAAAGAAGAGAAA
ACCCAGGTTATTAAACTGTTTAGCCGTTTTGCGACCAGCTTCAAA
GATTACTTCAAAAATCGTGCCAACTGCTTCAGCGCAGATGATATT
AGCAGTAGCAGCTGTCATCGTATTGTGAATGATAACGCCGAAATC
TTTTTTAGCAATGCCCTGGTTTATCGTCGCATCGTTAAAAATCTG
AGCAACGACGATATCAACAAAATCAGCGGTGATATGAAAGACAGC
CTGAAAGAAATGAGCCTGGAAAAAATCTACAGCTACGAAAAATAT
GGCGAGTTCATTACCCAAGAAGGCATCAGCTTTTATAACGATATT
TGCGGCAAAGTGAACAGCTTTATGAATCTGTATTGCCAGAAAAAC
AAAGAGAACAAAAACCTGTACAAACTGCGCAAACTGCATAAGCAG
ATTCTGTGTATTGCAGATACCAGCTATGAAGTGCCGTATAAATTC
GAAAGTGATGAAGAAGTGTACCAGAGCGTTAATGGTTTTCTGGAT
AACATCAGCAGCAAACACATTGTTGAACGTCTGCGTAAAATTGGC
GACAACTATAATGGCTATAACCTGGACAAAATTTACATCGTGAGC
AAGTTTTATGAACTGGTGAGCCAGAAAACATATCGTGATTGGGAA
ACAATTAATACCGCCTTGGAGATCCACTACAATAACATTCTGCCT
GGTAATGGTAAAAGCAAAGCCGACAAAGTTAAAAAGGCCGTGAAA
AATGATCTGCAGAAATCCATTACCGAAATCAACGAACTGGTCAGC
AACTATAAACTGTGTCCGGATGATAATATCAAGGCCGAAACCTAT
ATTCACGAAATCTCCCATATCCTGAACAACTTTGAAGCACAAGAG
CTGAAATATAACCCGGAAATTCATCTGGTTGAAAGCGAACTGAAA
GCCAGTGAACTGAAAAACGTTCTGGATGTGATTATGAACGCCTTT
CATTGGTGTAGCGTTTTTATGACCGAAGAACTGGTGGATAAGGAT
AACAACTTTTATGCCGAACTGGAAGAGATCTATGATGAAATTTAT
CCGGTGATCAGCCTGTATAATCTGGTGCGTAATTATGTGACCCAG
AAACCGTATAGCACCAAAAAAATCAAACTGAACTTTGGCATTCCG
ACACTGGCAGATGGTTGGAGCAAAAGTAAAGAATATAGCAACAAC
GCCATTATCCTGATGCGCGATAATCTGTACTATCTGGGTATCTTT
AACGCCAAAAACAAACCGGACAAAAAGATCATTGAAGGCAATACC
AGCGAAAACAAAGGCGACTATAAAAAGATGATCTACAATCTGCTG
CCTGGTCCGAATAAAATGATTCCGAAAGTTTTCCTGAGCAGTAAA
ACCGGTGTGGAAACATATAAACCGAGCGCATATATTCTGGAAGGC
TACAAACAGAACAAGCATCTGAAAAGCAGCAAAGACTTTGATATC
ACCTTTTGCCGTGATCTGATCGACTATTTCAAAAACTGCATTGCC
ATTCATCCGGAATGGAAAAACTTTGGCTTTGATTTTAGCGATACC
AGCACCTATGAAGATATCAGCGGTTTTTATCGTGAAGTTGAACTG
CAGGGCTATAAAATCGATTGGACCTATATTAGCGAGAAGGATATT
GATCTGCTGCAAGAAAAAGGTCAGCTGTACCTGTTTCAGATCTAC
AACAAAGACTTCAGCAAAAAAAGCACCGGCAATGATAATCTGCAT
ACCATGTATCTGAAGAACCTGTTTAGCGAAGAGAACCTGAAAGAC
ATTGTGCTGAAACTGAATGGTGAAGCCGAAATTTTCTTTCGTAAG
AGCAGCATCAAAAACCCGATCATCCATAAAAAAGGTAGCATTCTG
GTGAATCGTACGTATGAAGCAGAAGAAAAAGACCAGTTTGGCAAC
ATTCAGATTGTGCGTAAAACAATCCCGGAAAACATCTATCAAGAG
CTGTACAAATACTTTAACGATAAAAGCGATAAAGAACTGTCCGAT
GAAGCAGCCAAACTGAAGAATGTTGTTGGTCATCATGAAGCCGCA
ACCAACATTGTTAAAGATTATCGTTACACCTATGATAAATACTTT
CTGCACATGCCGATCACCATCAACTTTAAAGCAAATAAGACGAGC
TTCATCAACGATCGCATTCTGCAGTATATCGCCAAAGAAAAGGAT
CTGCATGTGATTGGTATTGATCGTGGTGAACGCAATCTGATTTAT
GTGAGCGTTATTGATACCTGCGGCAATATTGTGGAACAGAAAAGC
TTTAATATCGTGAACGGCTATGACTACCAGATCAAGCTGAAACAG
CAAGAAGGTGCACGTCAGATTGCACGTAAAGAATGGAAAGAAATC
GGCAAGATCAAAGAAATCAAAGAGGGTTATCTGAGCCTGGTGATT
CATGAAATTAGCAAAATGGTGATCAAATATAACGCCATCATTGCC
ATGGAAGATCTGAGTTATGGTTTCAAAAAAGGTCGCTTTAAGGTG
GAACGTCAGGTGTATCAGAAATTTGAAACGATGCTGATCAACAAA
CTGAATTATCTGGTGTTCAAGGACATCAGCATTACGGAAAATGGT
GGTCTGCTGAAAGGTTATCAGCTGACGTATATTCCGGAAAAGCTT
AAAAATGTGGGTCATCAGTGTGGCTGCATCTTTTATGTTCCGGCA
GCCTATACCAGCAAAATTGATCCGACCACCGGCTTTGTTAACATC
TTCAAATTCAAAGATCTGACCGTGGATGCCAAACGCGAATTTATC
AAAAAGTTTGATAGCATCCGCTACGACAGCGAGAAGAACTTATTT
TGTTTCACCTTCGACTACAACAACTTTATCACCCAGAATACGGTT
ATGAGCAAAAGCAGCTGGTCAGTTTATACCTATGGTGTGCGTATT
AAACGTCGCTTTGTGAATGGTCGCTTTTCAAATGAAAGCGACACC
ATCGATATCACCAAAGACATGGAAAAAACCCTGGAAATGACCGAT
ATTAACTGGCGTGATGGTCATGATCTGCGTCAGGATATTATCGAT
TATGAAATCGTGCAGCACATCTTTGAAATTTTTCGTCTGACCGTT
CAGATGCGTAATAGCCTGAGCGAGCTGGAAGATCGCGATTATGAT
CGTCTGATTAGTCCGGTTCTGAACGAAAACAACATCTTCTATGAT
AGCGCAAAAGCGGGTGATGCACTGCCGAAAGATGCCGATGCAAAT
GGTGCATATTGTATTGCACTGAAAGGCCTGTATGAAATCAAGCAG
ATTACCGAGAATTGGAAAGAGGATGGTAAATTCAGCCGTGATAAA
CTGAAAATCTCCAACAAGGATTGGTTCGATTTCATCCAGAATAAA
CGCTACCTG
Wild Type ERCAS12A Polypeptide Sequence
(SEQ ID NO: 2)
MNNGTNNFQNFIGISSLQKTLRNALIPTETTQQFIVKNGIIKEDE
LRGENRQILKDIMDDYYRGFISETLSSIDDIDWTSLFEKMEIQLK
NGDNKDTLIKEQTEYRKAIHKKFANDDRFKNMFSAKLISDILPEF
VIHNNNYSASEKEEKTQVIKLESRFATSFKDYFKNRANCESADDI
SSSSCHRIVNDNAEIFFSNALVYRRIVKSLSNDDINKISGDMKDS
LKEMSLEEIYSYEKYGEFITQEGISFYNDICGKVNSFMNLYCQKN
KENKNLYKLQKLHKQILCIADTSYEVPYKFESDEEVYQSVNGELD
NISSKHIVERLRKIGDNYNGYNLDKIYIVSKFYESVSQKTYRDWE
TINTALEIHYNNILPGNGKSKADKVKKAVKNDLQKSITEINELVS
NYKLCSDDNIKAETYIHEISHILNNFEAQELKYNPEIHLVESELK
ASELKNVLDVIMNAFHWCSVFMTEELVDKDNNFYAELEEIYDEIY
PVISLYNLVRNYVTQKPYSTKKIKLNFGIPTLADGWSKSKEYSNN
AIILMRDNLYYLGIFNAKNKPDKKIIEGNTSENKGDYKKMIYNLL
PGPNKMIPKVFLSSKTGVETYKPSAYILEGYKQNKHIKSSKDFDI
TFCHDLIDYFKNCIAIHPEWKNFGFDFSDTSTYEDISGFYREVEL
QGYKIDWTYISEKDIDLLQEKGQLYLFQIYNKDFSKKSTGNDNLH
TMYLKNLFSEENLKDIVLKLNGEAEIFFRKSSIKNPIIHKKGSIL
VNRTYEAEEKDQFGNIQIVRKNIPENIYQELYKYFNDKSDKELSD
EAAKLKNVVGHHEAATNIVKDYRYTYDKYFLHMPITINFKANKTG
FINDRILQYIAKEKDLHVIGIDRGERNLIYVSVIDTCGNIVEQKS
FNIVNGYDYQIKLKQQEGARQIARKEWKEIGKIKEIKEGYLSLVI
HEISKMVIKYNAIIAMEDLSYGFKKGRFKVERQVYQKFETMLINK
LNYLVFKDISITENGGLLKGYQLTYIPDKLKNVGHQCGCIFYVPA
AYTSKIDPTTGFVNIFKFKDLTVDAKREFIKKFDSIRYDSEKNLF
CFTFDYNNFITQNTVMSKSSWSVYTYGVRIKRRFVNGRESNESDT
IDITKDMEKTLEMTDINWRDGHDLRQDIIDYEIVQHIFEIFRLTV
QMRNSLSELEDRDYDRLISPVLNENNIFYDSAKAGDALPKDADAN
GAYCIALKGLYEIKQITENWKEDGKFSRDKLKISNKDWFDFIQNK
RYL

[0142] The phenotype scores of 22,409 ERCAS12A variants with single point mutation are listed in Table 2. Scores for synonymous changes (n=849, 69% of all positions) tightly clustered around 0, and thus serving as the baseline activity of ERCAS12A (SEQ ID NO: 2) (FIG. 1A). The enrichment measure for each ERCAS12A point mutation was highly consistent across biological replicates (FIG. 11B). Overall, 2,564 of 22,409 (˜11.4%) point mutations exhibited some benefits with score greater than the maximum score (0.41) of all synonymous changes (Table 2).

[0143] Specific mutated residues that conferred some benefit are shown in the sequence of the wild type ERCAS12A Polypeptide Sequence (SEQ ID NO: 2). Mutated residues are bolded; non-bold residues were not mutated. There were 2564 individual mutations at 763 specific residues of the 1263 amino acid residues (˜60%).

MNNGTNNFQNFIGISSLQKTLRNALIPTETTQQFIVKNGIIKEDE
LRGENRQILKDIMDDYYRGFISETLSSIDDIDWTSLFEKMEIQLK
NGDNKDTLIKEQAEKRKAIYKKFADDDRFKNMESAKLISDILPEF
VIHNNNYSASEKEEKTQVIKLFSRFATSFKDYFKNRANCFSADDI
SSSSCHRIVNDNAEIFFSNALVYRRIVKNLSNDDINKISGDMKDS
LKEMSLEKIYSYEKYGEFITQEGISFYNDICGKVNSFMNLYCQKN
KENKNLYKLRKLHKQILCIADTSYEVPYKFESDEEVYQSVNGELD
NISSKHIVERLRKIGDNYNGYNLDKIYIVSKFYELVSQKTYRDWE
TINTALEIHYNNILPGNGKSKADKVKKAVKNDLQKSITEINELVS
NYKLCPDDNIKAETYIHEISHILNNFEAQELKYNPEIHLVESELK
ASELKNVLDVIMNAFHWCSVFMTEELVDKDNNFYAELEEIYDEIY
PVISLYNLVRNYVTQKPYSTKKIKLNFGIPTLADGWSKSKEYSNN
AIILMRDNLYYLGIFNAKNKPDKKIIEGNTSENKGDYKKMIYNLL
PGPNKMIPKVFLSSKTGVETYKPSAYILEGYKQNKHLKSSKDFDI
TFCRDLIDYFKNCIAIHPEWKNFGFDFSDTSTYEDISGFYREVEL
QGYKIDWTYISEKDIDLLQEKGQLYLFQIYNKDFSKKSTGNDNLH
TMYLKNLFSEENLKDIVLKLNGEAEIFFRKSSIKNPIIHKKGSIL
VNRTYEAEEKDQFGNIQIVRKTIPENIYQELYKYENDKSDKELSD
EAAKLKNVVGHHEAATNIVKDYRYTYDKYFLHMPITINFKANKTS
FINDRILQYIAKEKDLHVIGIDRGERNLIYVSVIDTCGNIVEQKS
ENIVNGYDYQIKLKQQEGARQIARKEWKEIGKIKEIKEGYLSLVI
HEISKMVIKYNAIIAMEDLSYGEKKGRFKVERQVYQKFETMLINK
LNYLVFKDISITENGGLLKGYQLTYIPEKLKNVGHQCGCIFYVPA
AYTSKIDPTTGFVNIFKFKDLTVDAKREFIKKFDSIRYDSEKNLF
CFTFDYNNFITQNTVMSKSSWSVYTYGVRIKRRFVNGRESNESDT
IDITKDMEKTLEMTDINWRDGHDLRQDIIDYEIVQHIFEIFRLTV
QMRNSLSELEDRDYDRLISPVLNENNIFYDSAKAGDALPKDADAN
GAYCIALKGLYEIKQITENWKEDGKFSRDKLKISNKDWEDFIQNK
RYL

[0144] Table 2 shows ERCAS12A mutations with improved DNA cleavage activity in E. coli. The enrichment scores over 3 biological replicates were measured by deep sequencing. Mutants with average enrichment score greater than the maximal score of all synonymous variants (0.41) were considered as positive hits.

TABLE 2
ERCAS12A Mutations with Improved DNA
Cleavage Activity in E. coli

| | | | | | | | Enrich. |
|---|---|---|---|---|---|---|---|
| | | WT | Enrich. | Enrich. | Enrich. | Enrich. | (Std |
| No. | Mutant | Posit. | (REP1) | (REP 2) | (REP3) | (Avg) | Dev) |
| 1 | M1G | 1 | 0.23 | 1.37 | 0.7 | 0.77 | 0.47 |
| 2 | N2C | 2 | 0.23 | 0.28 | 2.21 | 0.9 | 0.92 |
| 3 | N3I | 3 | 0.63 | 0.68 | 0.01 | 0.44 | 0.31 |
| 4 | T5D | 5 | 2.31 | 0.98 | 0.7 | 1.33 | 0.7 |
| 5 | T5V | 5 | 0.74 | 0.8 | 0.7 | 0.75 | 0.04 |
| 6 | T5F | 5 | 0.52 | 0.69 | 0.42 | 0.54 | 0.11 |
| 7 | N6P | 6 | 0.7 | 0.62 | 0.8 | 0.71 | 0.07 |
| 8 | N7A | 7 | 1.53 | 1.26 | 0.99 | 1.26 | 0.22 |
| 9 | N7Q | 7 | 1.01 | 1.14 | 0.83 | 1 | 0.13 |
| 10 | N7E | 7 | 0.64 | 0.4 | 1.07 | 0.7 | 0.28 |
| 11 | N7I | 7 | 0.87 | 0.73 | 0.45 | 0.68 | 0.17 |
| 12 | N7D | 7 | 0.64 | 0.69 | 0.7 | 0.68 | 0.03 |
| 13 | N7Y | 7 | 0.49 | 0.55 | 0.65 | 0.56 | 0.07 |
| 14 | F8K | 8 | 1.34 | 2.08 | 1.96 | 1.79 | 0.33 |
| 15 | F8H | 8 | 0.64 | 0.51 | 0.24 | 0.47 | 0.17 |
| 16 | Q9D | 9 | 0.24 | 1.39 | 0.71 | 0.78 | 0.47 |
| 17 | N10A | 10 | 1.09 | 0.98 | 0.7 | 0.92 | 0.16 |
| 18 | NI0E | 10 | 0.24 | 1.67 | 0.01 | 0.64 | 0.74 |
| 19 | F11Q | 11 | 0.24 | 0.98 | 0.86 | 0.69 | 0.33 |
| 20 | F11E | 11 | 0.93 | 0.29 | 0.41 | 0.54 | 0.28 |
| 21 | I12Q | 12 | 0.64 | 1.13 | 0.52 | 0.76 | 0.27 |
| 22 | I12L | 12 | 0.53 | 0.28 | 0.45 | 0.42 | 0.1 |
| 23 | I14H | 14 | 1.06 | 0.78 | 1.08 | 0.97 | 0.14 |
| 24 | I14E | 14 | 1.2 | 0.9 | 0.68 | 0.93 | 0.21 |
| 25 | I14N | 14 | 0.93 | 0.86 | 0.87 | 0.89 | 0.03 |
| 26 | I14L | 14 | 0.74 | 0.46 | 0.47 | 0.56 | 0.13 |
| 27 | I14V | 14 | 0.39 | 0.48 | 0.79 | 0.55 | 0.17 |
| 28 | S15M | 15 | 1.6 | 1.36 | 1.89 | 1.62 | 0.22 |
| 29 | S15K | 15 | 1.75 | 1.11 | 0.49 | 1.12 | 0.51 |
| 30 | S15T | 15 | 0.72 | 0.67 | 0.93 | 0.77 | 0.11 |
| 31 | S16H | 16 | 1.82 | 1.77 | 1.08 | 1.56 | 0.34 |
| 32 | S16M | 16 | 1.02 | 1.14 | 1.01 | 1.06 | 0.06 |
| 33 | S16N | 16 | 0.72 | 1.11 | −0.42 | 0.47 | 0.65 |
| 34 | Q18I | 18 | 1.83 | 1.96 | 2.11 | 1.97 | 0.12 |
| 35 | Q18V | 18 | 1.05 | 1.62 | 1.83 | 1.5 | 0.33 |
| 36 | Q18M | 18 | 0.82 | 0.84 | 1.04 | 0.9 | 0.1 |
| 37 | Q18T | 18 | 1.22 | 0.73 | 0.38 | 0.77 | 0.34 |
| 38 | Q18N | 18 | 0.41 | 0.55 | 0.69 | 0.55 | 0.12 |
| 39 | Q18W | 18 | 1.05 | 0.95 | −0.43 | 0.52 | 0.68 |
| 40 | Q18R | 18 | 0.42 | 0.55 | 0.3 | 0.42 | 0.11 |
| 41 | A24E | 24 | 0.64 | 0.62 | 0.35 | 0.54 | 0.13 |
| 42 | I26P | 26 | 1.53 | 1.14 | 1.26 | 1.31 | 0.16 |
| 43 | P27F | 27 | 2.41 | 2.51 | 2.51 | 2.48 | 0.05 |
| 44 | P27M | 27 | 1.93 | 1.89 | 1.94 | 1.92 | 0.02 |
| 45 | P27Y | 27 | 1.79 | 1.29 | 1.7 | 1.6 | 0.22 |
| 46 | P27G | 27 | 1.41 | 1.38 | 1.64 | 1.48 | 0.12 |
| 47 | P27H | 27 | 1.47 | 1.17 | 1.32 | 1.32 | 0.12 |
| 48 | P27L | 27 | 0.96 | 0.94 | 0.99 | 0.97 | 0.02 |
| 49 | P27C | 27 | 0.66 | 0.62 | 0.5 | 0.59 | 0.07 |
| 50 | P27K | 27 | 0.87 | 0.29 | 0.37 | 0.51 | 0.26 |
| 51 | P27R | 27 | 0.49 | 0.42 | 0.36 | 0.42 | 0.05 |
| 52 | T28G | 28 | 0.57 | 0.61 | 0.43 | 0.53 | 0.07 |
| 53 | T30F | 30 | 2.47 | 2.16 | 2.14 | 2.26 | 0.15 |
| 54 | T30W | 30 | 1.88 | 1.66 | 1.5 | 1.68 | 0.16 |
| 55 | T30H | 30 | 1.91 | 1.89 | 0.79 | 1.53 | 0.52 |
| 56 | T30D | 30 | 1.42 | 0.62 | 0.86 | 0.97 | 0.34 |
| 57 | T30Q | 30 | 0.62 | 0.35 | 0.7 | 0.56 | 0.15 |
| 58 | T30V | 30 | 0.29 | 0.53 | 0.42 | 0.42 | 0.1 |
| 59 | T31G | 31 | 2.57 | 2.65 | 2.71 | 2.65 | 0.06 |
| 60 | T31C | 31 | 2.38 | 2.73 | 2.62 | 2.58 | 0.15 |
| 61 | T31N | 31 | 2.13 | 2.06 | 2.3 | 2.16 | 0.1 |
| 62 | T31A | 31 | 1.9 | 2.01 | 1.92 | 1.94 | 0.05 |
| 63 | T31P | 31 | 1.04 | 1.03 | 1.02 | 1.03 | 0.01 |
| 64 | T31M | 31 | 0.5 | 0.63 | 0.71 | 0.62 | 0.09 |
| 65 | T31L | 31 | 0.35 | 0.5 | 0.66 | 0.51 | 0.13 |
| 66 | T31H | 31 | 0.63 | 0.58 | 0.31 | 0.5 | 0.14 |
| 67 | T31S | 31 | 0.44 | 0.58 | 0.41 | 0.48 | 0.07 |
| 68 | T31D | 31 | 0.53 | 0.15 | 0.71 | 0.46 | 0.23 |
| 69 | Q32W | 32 | 2.47 | 2.62 | 2.72 | 2.61 | 0.1 |
| 70 | Q32M | 32 | 1.89 | 2.07 | 2 | 1.99 | 0.07 |
| 71 | Q32V | 32 | 1.78 | 1.92 | 1.87 | 1.86 | 0.06 |
| 72 | Q32F | 32 | 1.78 | 1.81 | 1.92 | 1.84 | 0.06 |
| 73 | Q32I | 32 | 1.7 | 1.87 | 1.77 | 1.78 | 0.07 |
| 74 | Q32C | 32 | 1.65 | 1.68 | 1.83 | 1.72 | 0.08 |
| 75 | Q32G | 32 | 1.52 | 1.61 | 1.76 | 1.63 | 0.1 |
| 76 | Q32T | 32 | 1.38 | 1.31 | 1.43 | 1.38 | 0.05 |
| 77 | Q32A | 32 | 1.12 | 1.4 | 1.34 | 1.29 | 0.12 |
| 78 | Q32L | 32 | 1.21 | 1.32 | 1.29 | 1.27 | 0.05 |
| 79 | Q32S | 32 | 1.22 | 1.27 | 1.28 | 1.25 | 0.03 |
| 80 | Q32Y | 32 | 1.05 | 0.78 | 1.05 | 0.96 | 0.13 |
| 81 | Q32N | 32 | 0.91 | 0.72 | 0.79 | 0.81 | 0.08 |
| 82 | Q32K | 32 | 0.67 | 0.77 | 0.71 | 0.71 | 0.04 |
| 83 | Q32P | 32 | 0.51 | 0.52 | 0.52 | 0.52 | 0.01 |
| 84 | Q33P | 33 | 1.24 | 1.44 | 1.41 | 1.37 | 0.09 |
| 85 | Q33F | 33 | 1.12 | 1.13 | 1.34 | 1.2 | 0.1 |
| 86 | Q33W | 33 | 0.94 | 1.5 | 0.57 | 1.01 | 0.38 |
| 87 | Q33V | 33 | 0.86 | 0.89 | 1.04 | 0.93 | 0.08 |
| 88 | Q33Y | 33 | 0.42 | 0.89 | 0.94 | 0.75 | 0.23 |
| 89 | Q33I | 33 | 0.62 | 0.47 | 0.96 | 0.68 | 0.2 |
| 90 | F34P | 34 | 2.4 | 2.47 | 2.57 | 2.48 | 0.07 |
| 91 | F34W | 34 | 0.84 | 0.82 | 0.87 | 0.84 | 0.02 |
| 92 | F34L | 34 | 0.54 | 0.73 | 0.7 | 0.65 | 0.08 |
| 93 | F34R | 34 | 0.57 | 0.69 | 0.38 | 0.55 | 0.13 |
| 94 | F34A | 34 | 0.66 | 0.39 | 0.58 | 0.54 | 0.11 |
| 95 | I35L | 35 | 3.18 | 3.38 | 3.39 | 3.32 | 0.1 |
| 96 | I35C | 35 | 3.05 | 3.16 | 3.31 | 3.18 | 0.11 |
| 97 | I35Q | 35 | 2.63 | 2.63 | 2.9 | 2.72 | 0.13 |
| 98 | I35A | 35 | 2.48 | 2.56 | 2.69 | 2.58 | 0.09 |
| 99 | I35S | 35 | 2.48 | 2.49 | 2.54 | 2.5 | 0.03 |
| 100 | I35E | 35 | 2.56 | 2.37 | 2.51 | 2.48 | 0.08 |
| 101 | I35M | 35 | 1.91 | 2.14 | 2.1 | 2.05 | 0.1 |
| 102 | I35N | 35 | 1.81 | 1.79 | 1.84 | 1.81 | 0.02 |
| 103 | I35F | 35 | 1.68 | 1.54 | 1.84 | 1.69 | 0.12 |
| 104 | I35T | 35 | 1.36 | 1.4 | 1.46 | 1.41 | 0.04 |
| 105 | I35Y | 35 | 1.26 | 1.38 | 1.52 | 1.38 | 0.11 |
| 106 | I35W | 35 | 1.06 | 1.27 | 1 | 1.11 | 0.12 |
| 107 | I35K | 35 | 1.13 | 0.97 | 1.22 | 1.11 | 0.1 |
| 108 | I35V | 35 | 0.59 | 0.7 | 0.9 | 0.73 | 0.13 |
| 109 | I35P | 35 | 0.38 | 0.51 | 0.66 | 0.52 | 0.11 |
| 110 | I35G | 35 | 0.55 | 0.16 | 0.72 | 0.48 | 0.23 |
| 111 | V36P | 36 | 1.7 | 1.88 | 1.96 | 1.85 | 0.11 |
| 112 | V36K | 36 | 1.65 | 1.58 | 1.84 | 1.69 | 0.11 |
| 113 | V36M | 36 | 0.47 | 0.67 | 0.59 | 0.58 | 0.08 |
| 114 | K37P | 37 | 1.86 | 2.01 | 1.99 | 1.95 | 0.06 |
| 115 | N38L | 38 | 1.96 | 2.04 | 2 | 2 | 0.03 |
| 116 | N38R | 38 | 1.58 | 1.8 | 1.75 | 1.71 | 0.1 |
| 117 | N38G | 38 | 1.52 | 1.73 | 1.83 | 1.69 | 0.13 |
| 118 | N38D | 38 | 1.5 | 1.64 | 1.93 | 1.69 | 0.18 |
| 119 | N38P | 38 | 1.37 | 1.54 | 1.65 | 1.52 | 0.11 |
| 120 | N38A | 38 | 1.27 | 1.39 | 1.38 | 1.35 | 0.06 |
| 121 | N38T | 38 | 1.19 | 1.18 | 1.03 | 1.13 | 0.07 |
| 122 | N38H | 38 | 0.84 | 1.06 | 0.95 | 0.95 | 0.09 |
| 123 | N38M | 38 | 0.9 | 0.8 | 0.82 | 0.84 | 0.04 |
| 124 | N38S | 38 | 0.77 | 0.92 | 0.76 | 0.81 | 0.08 |
| 125 | N38Q | 38 | 0.72 | 0.8 | 0.42 | 0.65 | 0.16 |
| 126 | N38I | 38 | 0.51 | 0.64 | 0.61 | 0.59 | 0.05 |
| 127 | N38E | 38 | 0.62 | 0.36 | 0.48 | 0.49 | 0.1 |
| 128 | N38V | 38 | 0.47 | 0.45 | 0.52 | 0.48 | 0.03 |
| 129 | G39Q | 39 | 3.42 | 3.64 | 3.58 | 3.55 | 0.09 |
| 130 | G39K | 39 | 3.24 | 3.42 | 3.48 | 3.38 | 0.1 |
| 131 | G39M | 39 | 2.99 | 3.15 | 3.13 | 3.09 | 0.07 |
| 132 | G39A | 39 | 2.97 | 3.12 | 3.15 | 3.08 | 0.08 |
| 133 | G39V | 39 | 2.9 | 3.13 | 3.18 | 3.07 | 0.12 |
| 134 | G39H | 39 | 2.87 | 2.99 | 2.88 | 2.91 | 0.05 |
| 135 | G39E | 39 | 2.75 | 2.95 | 2.96 | 2.89 | 0.1 |
| 136 | G39F | 39 | 2.56 | 2.93 | 2.87 | 2.79 | 0.16 |
| 137 | G39N | 39 | 2.65 | 2.81 | 2.85 | 2.77 | 0.09 |
| 138 | G39I | 39 | 2.66 | 2.79 | 2.82 | 2.76 | 0.07 |
| 139 | G39L | 39 | 2.59 | 2.76 | 2.81 | 2.72 | 0.09 |
| 140 | G39T | 39 | 2.41 | 2.53 | 2.53 | 2.49 | 0.06 |
| 141 | G39W | 39 | 2.2 | 2.41 | 2.31 | 2.31 | 0.09 |
| 142 | G39C | 39 | 2.12 | 2.12 | 2.14 | 2.13 | 0.01 |
| 143 | G39S | 39 | 2.05 | 2.06 | 2.19 | 2.1 | 0.06 |
| 144 | G39Y | 39 | 1.83 | 1.98 | 1.85 | 1.89 | 0.06 |
| 145 | G39P | 39 | 0.49 | 1.05 | 1.13 | 0.89 | 0.28 |
| 146 | G39D | 39 | 0.52 | 0.74 | 0.92 | 0.73 | 0.17 |
| 147 | G39R | 39 | 0.61 | 0.75 | 0.73 | 0.7 | 0.06 |
| 148 | I40Q | 40 | 2.91 | 3 | 3.08 | 3 | 0.07 |
| 149 | I40N | 40 | 2.6 | 2.81 | 2.77 | 2.73 | 0.09 |
| 150 | I40Y | 40 | 2.49 | 2.62 | 2.78 | 2.63 | 0.12 |
| 151 | I40R | 40 | 2.55 | 2.62 | 2.71 | 2.62 | 0.06 |
| 152 | I40E | 40 | 2.38 | 2.55 | 2.66 | 2.53 | 0.12 |
| 153 | I40C | 40 | 2.38 | 2.51 | 2.48 | 2.46 | 0.06 |
| 154 | I40V | 40 | 2.29 | 2.52 | 2.5 | 2.44 | 0.11 |
| 155 | I40T | 40 | 2.39 | 2.45 | 2.44 | 2.42 | 0.03 |
| 156 | I40K | 40 | 1.59 | 1.76 | 1.75 | 1.7 | 0.08 |
| 157 | I40D | 40 | 1.42 | 1.61 | 1.6 | 1.55 | 0.09 |
| 158 | I40W | 40 | 1.38 | 1.43 | 1.63 | 1.48 | 0.11 |
| 159 | I40L | 40 | 1.13 | 1.25 | 1.24 | 1.2 | 0.05 |
| 160 | I40P | 40 | 0.62 | 0.83 | 0.81 | 0.75 | 0.1 |
| 161 | E43T | 43 | 1.14 | 1.32 | 1.16 | 1.21 | 0.08 |
| 162 | E43Q | 43 | 0.92 | 0.98 | 1.19 | 1.03 | 0.11 |
| 163 | E43S | 43 | 0.73 | 0.98 | 0.81 | 0.84 | 0.11 |
| 164 | E43L | 43 | 0.85 | 0.71 | 0.71 | 0.75 | 0.07 |
| 165 | E43I | 43 | 0.77 | 0.76 | 0.69 | 0.74 | 0.04 |
| 166 | E43V | 43 | 0.65 | 0.68 | 0.62 | 0.65 | 0.02 |
| 167 | E43C | 43 | 0.38 | 0.73 | 0.65 | 0.59 | 0.15 |
| 168 | E45R | 45 | 0.96 | 1.13 | 0.66 | 0.92 | 0.19 |
| 169 | E45F | 45 | 0.52 | 0.57 | 0.74 | 0.61 | 0.09 |
| 170 | L46N | 46 | 1.25 | 1.4 | 1.6 | 1.42 | 0.15 |
| 171 | L46S | 46 | 1.29 | 1.55 | 1.41 | 1.41 | 0.11 |
| 172 | L46D | 46 | 1.12 | 1.35 | 1.31 | 1.26 | 0.1 |
| 173 | L46K | 46 | 0.93 | 0.87 | 1.23 | 1.01 | 0.16 |
| 174 | L46G | 46 | 0.79 | 0.76 | 1.05 | 0.87 | 0.13 |
| 175 | L46C | 46 | 0.79 | 0.85 | 0.64 | 0.76 | 0.09 |
| 176 | L46H | 46 | 0.75 | 0.48 | 0.91 | 0.71 | 0.17 |
| 177 | L46T | 46 | 0.6 | 0.7 | 0.79 | 0.7 | 0.08 |
| 178 | L46E | 46 | 0.57 | 0.56 | 0.55 | 0.56 | 0.01 |
| 179 | E49Y | 49 | 1.83 | 1.88 | 1.77 | 1.82 | 0.04 |
| 180 | E49N | 49 | 1.47 | 1.52 | 1.86 | 1.61 | 0.18 |
| 181 | E49P | 49 | 1.57 | 1.64 | 1.33 | 1.51 | 0.14 |
| 182 | E49F | 49 | 1.21 | 1.18 | 1.31 | 1.23 | 0.05 |
| 183 | E49R | 49 | 1.17 | 1.26 | 1.26 | 1.23 | 0.04 |
| 184 | E49M | 49 | 1.29 | 1.06 | 0.82 | 1.06 | 0.19 |
| 185 | E49T | 49 | 0.83 | 1.34 | 0.86 | 1.01 | 0.23 |
| 186 | E49H | 49 | 1.01 | 1.16 | 0.63 | 0.93 | 0.22 |
| 187 | E49L | 49 | 0.86 | 0.82 | 0.85 | 0.84 | 0.02 |
| 188 | E49C | 49 | 0.46 | 0.91 | 0.83 | 0.73 | 0.2 |
| 189 | E49I | 49 | 0.92 | 0.44 | 0.69 | 0.69 | 0.2 |
| 190 | E49S | 49 | 0.63 | 0.53 | 0.65 | 0.6 | 0.05 |
| 191 | E49K | 49 | 0.43 | 0.4 | 0.42 | 0.42 | 0.01 |
| 192 | N50Q | 50 | 0.51 | 0.11 | 0.91 | 0.51 | 0.33 |
| 193 | Q52V | 52 | 0.61 | 0.65 | 0.69 | 0.65 | 0.03 |
| 194 | Q52C | 52 | 0.62 | 0.58 | 0.42 | 0.54 | 0.09 |
| 195 | L54G | 54 | 0.59 | 0.55 | 0.51 | 0.55 | 0.03 |
| 196 | D56P | 56 | 1.15 | 1.41 | 1.52 | 1.36 | 0.15 |
| 197 | D56R | 56 | 0.98 | 0.95 | 0.95 | 0.96 | 0.01 |
| 198 | D56K | 56 | 0.61 | 1.03 | 0.58 | 0.74 | 0.21 |
| 199 | D56A | 56 | 0.57 | 0.29 | 0.68 | 0.51 | 0.16 |
| 200 | I57E | 57 | 1.3 | 1.28 | 1.3 | 1.3 | 0.01 |
| 201 | I57C | 57 | 1.48 | 1.27 | 0.89 | 1.21 | 0.25 |
| 202 | I57P | 57 | 0.95 | 0.93 | 0.84 | 0.91 | 0.05 |
| 203 | I57G | 57 | 0.74 | 0.65 | 0.98 | 0.79 | 0.14 |
| 204 | I57A | 57 | 0.91 | 0.59 | 0.86 | 0.79 | 0.14 |
| 205 | I57T | 57 | 0.47 | 0.66 | 0.55 | 0.56 | 0.08 |
| 206 | I57Q | 57 | 0.94 | 0.36 | 0.37 | 0.56 | 0.27 |
| 207 | I57V | 57 | 0.53 | 0.58 | 0.38 | 0.5 | 0.09 |
| 208 | I57L | 57 | 0.32 | 0.56 | 0.37 | 0.42 | 0.1 |
| 209 | D59A | 59 | 0.94 | 1.09 | 1.11 | 1.05 | 0.08 |
| 210 | D59I | 59 | 0.95 | 1.07 | 0.65 | 0.89 | 0.17 |
| 211 | D59S | 59 | 0.76 | 0.92 | 0.93 | 0.87 | 0.08 |
| 212 | D59T | 59 | 0.78 | 0.98 | 0.66 | 0.81 | 0.13 |
| 213 | D59R | 59 | 0.93 | 0.65 | 0.62 | 0.73 | 0.14 |
| 214 | D59G | 59 | 0.86 | 0.54 | 0.62 | 0.67 | 0.14 |
| 215 | D59M | 59 | 0.49 | 0.7 | 0.4 | 0.53 | 0.13 |
| 216 | D59L | 59 | 0.42 | 0.52 | 0.56 | 0.5 | 0.06 |
| 217 | D59Q | 59 | 0.67 | 0.29 | 0.38 | 0.45 | 0.16 |
| 218 | D60R | 60 | 0.92 | 1.26 | 1.38 | 1.18 | 0.19 |
| 219 | D60N | 60 | 1.23 | 0.68 | 1.22 | 1.04 | 0.26 |
| 220 | D60M | 60 | 0.76 | 0.82 | 0.77 | 0.78 | 0.02 |
| 221 | D60T | 60 | 0.48 | 0.89 | 0.83 | 0.73 | 0.18 |
| 222 | D60G | 60 | 0.6 | 0.73 | 0.85 | 0.73 | 0.1 |
| 223 | D60V | 60 | 0.92 | 0.74 | 0.39 | 0.69 | 0.22 |
| 224 | D60K | 60 | 0.9 | 0.4 | 0.61 | 0.64 | 0.2 |
| 225 | D60Y | 60 | 0.34 | 0.72 | 0.73 | 0.6 | 0.18 |
| 226 | D60P | 60 | 0.65 | 0.76 | 0.36 | 0.59 | 0.17 |
| 227 | D60F | 60 | 0.87 | −0.02 | 0.75 | 0.53 | 0.4 |
| 228 | D60L | 60 | 0.48 | 0.75 | 0.25 | 0.49 | 0.2 |
| 229 | D60A | 60 | 0.51 | 0.32 | 0.62 | 0.49 | 0.12 |
| 230 | Y62Q | 62 | 1.41 | 1.96 | 1.06 | 1.48 | 0.37 |
| 231 | Y62A | 62 | 1.37 | 0.78 | 0.85 | 1 | 0.26 |
| 232 | Y62F | 62 | 1.2 | 0.67 | 0.98 | 0.95 | 0.22 |
| 233 | Y62V | 62 | 0.63 | 1.04 | 0.79 | 0.82 | 0.17 |
| 234 | Y62N | 62 | 0.29 | 0.79 | 0.28 | 0.45 | 0.24 |
| 235 | R63M | 63 | 0.49 | 0.69 | 0.41 | 0.53 | 0.12 |
| 236 | R63V | 63 | 0.4 | 0.56 | 0.34 | 0.43 | 0.09 |
| 237 | F65E | 65 | 1.27 | 1.08 | 0.8 | 1.05 | 0.19 |
| 238 | F65K | 65 | 0.79 | 0.4 | 0.75 | 0.65 | 0.17 |
| 239 | F65R | 65 | 0.45 | 0.47 | 0.44 | 0.46 | 0.01 |
| 240 | S67V | 67 | 1.04 | 0.68 | 0.92 | 0.88 | 0.15 |
| 241 | S67Y | 67 | 0.77 | 0.77 | 0.68 | 0.74 | 0.04 |
| 242 | S67F | 67 | 0.76 | 0.84 | 0.56 | 0.72 | 0.12 |
| 243 | S67Q | 67 | 0.59 | 0.45 | 0.57 | 0.53 | 0.06 |
| 244 | S67A | 67 | 0.55 | 0.4 | 0.51 | 0.49 | 0.06 |
| 245 | S67W | 67 | 0.49 | 0.48 | 0.31 | 0.43 | 0.08 |
| 246 | E68V | 68 | 0.99 | 1.13 | 1.51 | 1.21 | 0.22 |
| 247 | E68A | 68 | 1.18 | 0.41 | 0.38 | 0.66 | 0.37 |
| 248 | E68R | 68 | 0.75 | 0.64 | 0.36 | 0.58 | 0.16 |
| 249 | T69F | 69 | 1.81 | 2.06 | 1.93 | 1.93 | 0.1 |
| 250 | T69M | 69 | 0.49 | 1.24 | 0.68 | 0.8 | 0.32 |
| 251 | T69D | 69 | 1.3 | 0.26 | 0.68 | 0.75 | 0.43 |
| 252 | T69H | 69 | 0.2 | 0.96 | 0.68 | 0.61 | 0.31 |
| 253 | T69W | 69 | 0.2 | 0.77 | 0.5 | 0.49 | 0.23 |
| 254 | T69L | 69 | 0.44 | 0.39 | 0.5 | 0.44 | 0.04 |
| 255 | S71Q | 71 | 0.61 | 1.28 | 0.39 | 0.76 | 0.38 |
| 256 | I73E | 73 | 0.38 | 0.5 | 0.56 | 0.48 | 0.07 |
| 257 | D75R | 75 | 0.81 | 0.27 | 0.84 | 0.64 | 0.26 |
| 258 | I76Q | 76 | 0.61 | 0.83 | 0.86 | 0.77 | 0.11 |
| 259 | I76G | 76 | 0.79 | 0.74 | 0.59 | 0.71 | 0.09 |
| 260 | I76F | 76 | 1.57 | −0.12 | 0.5 | 0.65 | 0.7 |
| 261 | D77P | 77 | 0.75 | 0.64 | 0.66 | 0.68 | 0.05 |
| 262 | T79E | 79 | 0.52 | 0.39 | 0.56 | 0.49 | 0.07 |
| 263 | T79R | 79 | 0.45 | 0.53 | 0.39 | 0.46 | 0.05 |
| 264 | S80N | 80 | 0.62 | 0.5 | 0.31 | 0.48 | 0.13 |
| 265 | S80Q | 80 | 0.44 | 0.62 | 0.32 | 0.46 | 0.12 |
| 266 | S80V | 80 | 0.36 | 0.42 | 0.48 | 0.42 | 0.05 |
| 267 | L81Y | 81 | 0.71 | 0.73 | 0.6 | 0.68 | 0.05 |
| 268 | L81H | 81 | 0.64 | 0.68 | 0.51 | 0.61 | 0.07 |
| 269 | L81W | 81 | 0.39 | 0.59 | 0.73 | 0.57 | 0.14 |
| 270 | L81E | 81 | 0.94 | 0.28 | 0.39 | 0.54 | 0.29 |
| 271 | F82Q | 82 | 0.38 | 0.42 | 0.66 | 0.49 | 0.12 |
| 272 | K84F | 84 | 0.4 | 0.66 | 0.49 | 0.52 | 0.11 |
| 273 | M85G | 85 | 1.06 | 1.18 | 1.18 | 1.14 | 0.06 |
| 274 | M85Q | 85 | 0.79 | 0.8 | 1.34 | 0.98 | 0.26 |
| 275 | M85Y | 85 | 1.11 | 0.78 | 0.94 | 0.95 | 0.14 |
| 276 | M85A | 85 | 0.85 | 0.79 | 1.09 | 0.91 | 0.13 |
| 277 | M85N | 85 | 0.67 | 0.98 | 0.82 | 0.82 | 0.13 |
| 278 | M85W | 85 | 0.56 | 0.44 | 1.11 | 0.7 | 0.29 |
| 279 | M85E | 85 | 0.7 | 0.51 | 0.64 | 0.62 | 0.08 |
| 280 | M85F | 85 | 0.42 | 0.58 | 0.42 | 0.47 | 0.08 |
| 281 | E86N | 86 | 0.44 | 1.02 | 0.66 | 0.71 | 0.24 |
| 282 | I87G | 87 | 0.7 | 0.79 | 0.46 | 0.65 | 0.14 |
| 283 | I87A | 87 | 0.68 | 0.55 | 0.29 | 0.51 | 0.16 |
| 284 | I87H | 87 | 0.25 | 0.65 | 0.62 | 0.5 | 0.18 |
| 285 | I87W | 87 | 0.38 | 0.46 | 0.43 | 0.42 | 0.03 |
| 286 | Q88N | 88 | 1.07 | 0.64 | 0.84 | 0.85 | 0.18 |
| 287 | Q88E | 88 | 0.28 | 1.1 | 0.97 | 0.78 | 0.36 |
| 288 | Q88S | 88 | 0.41 | 0.47 | 0.5 | 0.46 | 0.04 |
| 289 | L89Q | 89 | 0.97 | 0.96 | 1.21 | 1.05 | 0.12 |
| 290 | L89S | 89 | 0.47 | 0.54 | 0.6 | 0.54 | 0.05 |
| 291 | L89C | 89 | 0.6 | 0.61 | 0.37 | 0.52 | 0.11 |
| 292 | L89D | 89 | 0.63 | 0.32 | 0.47 | 0.48 | 0.13 |
| 293 | L89G | 89 | 0.21 | 0.8 | 0.33 | 0.45 | 0.25 |
| 294 | K90P | 90 | 1.13 | 1.38 | 1.11 | 1.21 | 0.12 |
| 295 | N91V | 91 | 0.84 | 0.37 | 0.47 | 0.56 | 0.2 |
| 296 | G92D | 92 | 0.21 | 1.04 | 0.37 | 0.54 | 0.36 |
| 297 | G92F | 92 | −0.07 | 0 | 1.51 | 0.48 | 0.73 |
| 298 | D93L | 93 | 0.83 | 0.76 | 1.16 | 0.92 | 0.17 |
| 299 | D93P | 93 | 0.68 | 0.87 | 0.7 | 0.75 | 0.09 |
| 300 | D93T | 93 | 0.46 | 0.45 | 0.96 | 0.62 | 0.24 |
| 301 | D93N | 93 | −0.04 | 0.65 | 0.81 | 0.47 | 0.37 |
| 302 | D93R | 93 | 0.36 | 0.36 | 0.66 | 0.46 | 0.14 |
| 303 | D93M | 93 | 0.68 | 0.66 | 0.01 | 0.45 | 0.31 |
| 304 | N94P | 94 | 1.28 | 0.92 | 0.59 | 0.93 | 0.28 |
| 305 | K95T | 95 | 0.8 | 1 | 1.03 | 0.94 | 0.1 |
| 306 | K95F | 95 | 0.5 | 0.8 | 0.95 | 0.75 | 0.19 |
| 307 | K95L | 95 | 0.9 | 0.62 | 0.48 | 0.67 | 0.17 |
| 308 | K95P | 95 | 0.82 | 0.69 | 0.44 | 0.65 | 0.16 |
| 309 | K95E | 95 | 0.97 | 0.23 | 0.64 | 0.61 | 0.3 |
| 310 | K95W | 95 | 0.43 | 0.46 | 0.61 | 0.5 | 0.08 |
| 311 | K95I | 95 | 0.64 | 0.41 | 0.4 | 0.48 | 0.11 |
| 312 | K95S | 95 | 0.4 | 0.55 | 0.37 | 0.44 | 0.08 |
| 313 | D96C | 96 | 0.91 | 0.51 | 0.57 | 0.66 | 0.18 |
| 314 | T97W | 97 | 0.95 | 0.29 | 0.42 | 0.55 | 0.28 |
| 315 | L98Q | 98 | 1.8 | 1.34 | 1.71 | 1.62 | 0.2 |
| 316 | L98A | 98 | 1.07 | 1.3 | 0.84 | 1.07 | 0.19 |
| 317 | L98H | 98 | 0.92 | 0.92 | 1.12 | 0.99 | 0.09 |
| 318 | L98D | 98 | 1.27 | 0.83 | 0.85 | 0.98 | 0.2 |
| 319 | L98N | 98 | 0.92 | 0.99 | 0.74 | 0.88 | 0.1 |
| 320 | L98G | 98 | 0.76 | 0.81 | 0.82 | 0.8 | 0.03 |
| 321 | L98S | 98 | 0.82 | 0.84 | 0.62 | 0.76 | 0.1 |
| 322 | L98T | 98 | 0.88 | 0.77 | 0.41 | 0.69 | 0.2 |
| 323 | L98C | 98 | 0.84 | 0.3 | 0.76 | 0.63 | 0.24 |
| 324 | L98P | 98 | 0.53 | 0.41 | 0.36 | 0.43 | 0.07 |
| 325 | I99W | 99 | 0.96 | 1.23 | 0.8 | 1 | 0.18 |
| 326 | I99Y | 99 | 0.83 | 0.79 | 0.69 | 0.77 | 0.06 |
| 327 | E101P | 101 | 0.39 | 0.6 | 0.6 | 0.53 | 0.1 |
| 328 | Q102I | 102 | 0.92 | 0.3 | 2.73 | 1.31 | 1.03 |
| 329 | Q102V | 102 | 0.63 | 0.9 | 1 | 0.84 | 0.16 |
| 330 | T103Y | 103 | 0.63 | 0.7 | 0.42 | 0.58 | 0.12 |
| 331 | E104P | 104 | 0.6 | 0.82 | 0.86 | 0.76 | 0.11 |
| 332 | Y105R | 105 | 1.49 | 1.87 | 1.86 | 1.74 | 0.18 |
| 333 | Y105P | 105 | 1.04 | 0.52 | 1.89 | 1.15 | 0.57 |
| 334 | Y105A | 105 | 0.63 | 0.29 | 1.52 | 0.82 | 0.52 |
| 335 | Y105T | 105 | 1 | 0.11 | 0.87 | 0.66 | 0.39 |
| 336 | Y105G | 105 | 0.22 | 0.52 | 0.94 | 0.56 | 0.29 |
| 337 | R106T | 106 | 0.79 | 0.3 | 0.71 | 0.6 | 0.21 |
| 338 | R106V | 106 | 0.29 | 0.65 | 0.52 | 0.49 | 0.15 |
| 339 | R106I | 106 | 0.23 | 0.7 | 0.38 | 0.44 | 0.2 |
| 340 | A108R | 108 | 0.73 | 0.43 | 0.41 | 0.52 | 0.15 |
| 341 | K111T | 111 | 0.75 | 0.63 | 0.78 | 0.72 | 0.07 |
| 342 | K111W | 111 | 0.62 | 0.71 | 0.59 | 0.64 | 0.05 |
| 343 | K111G | 111 | 0.6 | 0.61 | 0.69 | 0.63 | 0.04 |
| 344 | K111A | 111 | 0.56 | 0.69 | 0.56 | 0.6 | 0.06 |
| 345 | K111F | 111 | 0.44 | 0.59 | 0.7 | 0.57 | 0.11 |
| 346 | K111V | 111 | 0.69 | 0.51 | 0.43 | 0.54 | 0.11 |
| 347 | K111S | 111 | 0.48 | 0.62 | 0.52 | 0.54 | 0.06 |
| 348 | K111C | 111 | 0.32 | 0.39 | 0.56 | 0.42 | 0.1 |
| 349 | K112D | 112 | 1.73 | 0.3 | 2.17 | 1.4 | 0.8 |
| 350 | K112H | 112 | 0.92 | 1.76 | 0.72 | 1.14 | 0.45 |
| 351 | K112E | 112 | 0.99 | 1.12 | 1.03 | 1.05 | 0.06 |
| 352 | K112L | 112 | 0.79 | 1.4 | 0.43 | 0.87 | 0.4 |
| 353 | K112T | 112 | 0.52 | 0.81 | 0.87 | 0.73 | 0.16 |
| 354 | K112C | 112 | 0.63 | 0.3 | 0.72 | 0.55 | 0.18 |
| 355 | K112R | 112 | 0.55 | 0.13 | 0.96 | 0.55 | 0.34 |
| 356 | K112P | 112 | 0.41 | 0.63 | 0.5 | 0.51 | 0.09 |
| 357 | F113A | 113 | 0.23 | 0.42 | 0.72 | 0.45 | 0.2 |
| 358 | A114S | 114 | 1.21 | 1.28 | 0.72 | 1.07 | 0.25 |
| 359 | A114E | 114 | 1.07 | −0.11 | 0.87 | 0.61 | 0.52 |
| 360 | N115W | 115 | 0.7 | 0.99 | 0.02 | 0.57 | 0.4 |
| 361 | N115M | 115 | 0.42 | 0.25 | 0.78 | 0.48 | 0.22 |
| 362 | R118D | 118 | 2.53 | 2.24 | 1.81 | 2.19 | 0.29 |
| 363 | R118A | 118 | 0.92 | 0.99 | 0.93 | 0.95 | 0.03 |
| 364 | R118Y | 118 | 1.11 | −0.04 | 0.47 | 0.51 | 0.47 |
| 365 | R118N | 118 | 0.92 | 1.21 | −0.68 | 0.48 | 0.83 |
| 366 | R118V | 118 | 0.85 | −0.17 | 0.65 | 0.44 | 0.44 |
| 367 | F119H | 119 | 1.48 | 1.21 | 1.4 | 1.36 | 0.11 |
| 368 | F119D | 119 | 0.45 | 0.29 | 0.71 | 0.48 | 0.17 |
| 369 | K120A | 120 | 0.95 | 0.88 | 0.57 | 0.8 | 0.17 |
| 370 | K120C | 120 | 0.36 | 0.29 | 0.67 | 0.44 | 0.16 |
| 371 | K120V | 120 | 0.19 | 0.45 | 0.66 | 0.43 | 0.19 |
| 372 | K120T | 120 | 0.34 | 0.32 | 0.63 | 0.43 | 0.14 |
| 373 | K120P | 120 | 0.28 | 0.55 | 0.44 | 0.42 | 0.11 |
| 374 | N121F | 121 | 0.48 | 0.32 | 0.53 | 0.45 | 0.09 |
| 375 | M122W | 122 | 0.51 | 0.47 | 0.45 | 0.48 | 0.02 |
| 376 | F123E | 123 | 0.44 | 0.43 | 0.48 | 0.45 | 0.02 |
| 377 | S124N | 124 | 1.32 | 0.38 | 0.11 | 0.6 | 0.52 |
| 378 | L127Q | 127 | 0.4 | 0.46 | 1.34 | 0.73 | 0.43 |
| 379 | I128Q | 128 | 2.16 | 1.89 | 1.39 | 1.81 | 0.32 |
| 380 | S129G | 129 | 0.91 | 1.38 | 1.1 | 1.13 | 0.19 |
| 381 | S129F | 129 | 0.21 | 1.38 | 1.1 | 0.9 | 0.5 |
| 382 | S129D | 129 | −0.48 | 0.97 | 0.92 | 0.47 | 0.67 |
| 383 | S129I | 129 | 0.91 | 0.41 | 0.01 | 0.44 | 0.37 |
| 384 | D130I | 130 | 0.47 | 0.67 | 0.22 | 0.45 | 0.18 |
| 385 | L132T | 132 | 0.91 | 1.2 | 1.11 | 1.07 | 0.12 |
| 386 | L132G | 132 | 0.73 | 0.95 | 0.75 | 0.81 | 0.1 |
| 387 | L132A | 132 | 0.64 | 0.8 | 0.76 | 0.73 | 0.07 |
| 388 | F135D | 135 | 1.04 | 0.82 | 0.63 | 0.83 | 0.17 |
| 389 | F135A | 135 | 0.6 | 0.67 | 0.53 | 0.6 | 0.06 |
| 390 | F135H | 135 | 0.55 | 0.46 | 0.54 | 0.52 | 0.04 |
| 391 | F135T | 135 | 0.35 | 0.6 | 0.33 | 0.43 | 0.12 |
| 392 | V136Y | 136 | 0.59 | 0.65 | 0.32 | 0.52 | 0.15 |
| 393 | I137Q | 137 | 0.49 | 0.73 | 0.49 | 0.57 | 0.11 |
| 394 | H138M | 138 | 0.9 | 1.58 | 0.52 | 1 | 0.44 |
| 395 | H138A | 138 | 0.21 | 1.07 | 0.88 | 0.72 | 0.37 |
| 396 | H138S | 138 | 0.21 | 0.81 | 0.91 | 0.64 | 0.31 |
| 397 | H138V | 138 | 0.97 | 0.53 | 0.14 | 0.55 | 0.34 |
| 398 | N139Q | 139 | 1.72 | 2.15 | 2.61 | 2.16 | 0.36 |
| 399 | N139C | 139 | 1.42 | 1.13 | 1.39 | 1.31 | 0.13 |
| 400 | N139A | 139 | 0.72 | 0.68 | 1.43 | 0.95 | 0.34 |
| 401 | N139R | 139 | 0.93 | 1.05 | 0.36 | 0.78 | 0.3 |
| 402 | N139I | 139 | 0.79 | 0.28 | 0.9 | 0.65 | 0.27 |
| 403 | N139P | 139 | 0.21 | −0.13 | 1.68 | 0.59 | 0.78 |
| 404 | N139L | 139 | 0.29 | 0.53 | 0.52 | 0.45 | 0.11 |
| 405 | N139F | 139 | 0.72 | 0.28 | 0.29 | 0.43 | 0.21 |
| 406 | N139G | 139 | 0.76 | 0.18 | 0.31 | 0.42 | 0.25 |
| 407 | N140C | 140 | 1.92 | 1.89 | 2.02 | 1.94 | 0.06 |
| 408 | N140G | 140 | 0.71 | 0.9 | 0.66 | 0.76 | 0.1 |
| 409 | N140P | 140 | 0.81 | 0.83 | 0.6 | 0.75 | 0.1 |
| 410 | N140T | 140 | 0.68 | 0.84 | 0.51 | 0.68 | 0.14 |
| 411 | N140S | 140 | 0.58 | 0.54 | 0.62 | 0.58 | 0.03 |
| 412 | N141P | 141 | 0.51 | 0.06 | 1.04 | 0.54 | 0.4 |
| 413 | N141F | 141 | 0.1 | 0.53 | 0.75 | 0.46 | 0.27 |
| 414 | Y142G | 142 | 0.77 | 0.69 | 0.85 | 0.77 | 0.06 |
| 415 | Y142K | 142 | 0.77 | 0.89 | 0.52 | 0.73 | 0.15 |
| 416 | Y142E | 142 | 0.27 | 0.44 | 1.23 | 0.65 | 0.42 |
| 417 | Y142R | 142 | 0.74 | 0.86 | 0.33 | 0.64 | 0.22 |
| 418 | Y142P | 142 | 0.82 | 0.28 | 0.66 | 0.59 | 0.22 |
| 419 | Y142V | 142 | 0.54 | 0.61 | 0.19 | 0.45 | 0.19 |
| 420 | S143R | 143 | 0.36 | 0.47 | 1.68 | 0.84 | 0.6 |
| 421 | S143E | 143 | 0.7 | 0.69 | 0.42 | 0.6 | 0.13 |
| 422 | S143G | 143 | 0.91 | 0.38 | 0.35 | 0.55 | 0.26 |
| 423 | S143V | 143 | 0.77 | 0.65 | 0.17 | 0.53 | 0.26 |
| 424 | S143I | 143 | 0.41 | 0.83 | 0.12 | 0.45 | 0.29 |
| 425 | A144R | 144 | 0.83 | 1.42 | 2.34 | 1.53 | 0.62 |
| 426 | A144I | 144 | 1.31 | 0.29 | 1.96 | 1.19 | 0.69 |
| 427 | A144K | 144 | 1.21 | 0.54 | 1.06 | 0.94 | 0.29 |
| 428 | A144N | 144 | 0.21 | 0.8 | 0.86 | 0.62 | 0.29 |
| 429 | A144P | 144 | 0.37 | 0.29 | 0.93 | 0.53 | 0.28 |
| 430 | A144C | 144 | 0.42 | 0.58 | 0.59 | 0.53 | 0.08 |
| 431 | A144D | 144 | −0.7 | 0.98 | 1.23 | 0.5 | 0.86 |
| 432 | A144T | 144 | 0.83 | 0.21 | 0.2 | 0.42 | 0.29 |
| 433 | E146R | 146 | 1.36 | 0.54 | 3.04 | 1.65 | 1.04 |
| 434 | E146T | 146 | 1.75 | 1.38 | 1.11 | 1.42 | 0.26 |
| 435 | E146M | 146 | 0.77 | 1.1 | 0.42 | 0.76 | 0.28 |
| 436 | E146I | 146 | 0.62 | 0.51 | 1.11 | 0.75 | 0.26 |
| 437 | E146S | 146 | 0.55 | 0.47 | 0.67 | 0.56 | 0.08 |
| 438 | K147F | 147 | 0.68 | 0.82 | 1.11 | 0.87 | 0.18 |
| 439 | K147A | 147 | 0.4 | 1.24 | 0.48 | 0.71 | 0.38 |
| 440 | K147G | 147 | 0.68 | 0.62 | 0.8 | 0.7 | 0.07 |
| 441 | K147Q | 147 | 0.09 | 0.11 | 1.86 | 0.69 | 0.83 |
| 442 | K147L | 147 | 0.74 | 0.74 | 0.52 | 0.66 | 0.1 |
| 443 | E148C | 148 | 0.43 | 0.45 | 1.54 | 0.81 | 0.52 |
| 444 | E148P | 148 | 0.82 | 0.1 | 0.42 | 0.45 | 0.29 |
| 445 | E149L | 149 | 0.99 | 0.98 | 0.62 | 0.86 | 0.17 |
| 446 | E149R | 149 | 0.59 | 0.93 | 0.18 | 0.57 | 0.31 |
| 447 | K150G | 150 | 1.87 | 1.2 | 1.67 | 1.58 | 0.28 |
| 448 | K150C | 150 | 1.31 | 1.38 | 1.11 | 1.27 | 0.12 |
| 449 | K150A | 150 | 1.39 | 0.84 | 0.82 | 1.02 | 0.26 |
| 450 | K150I | 150 | −0.48 | 1.49 | 1.36 | 0.79 | 0.9 |
| 451 | K150W | 150 | 1.06 | 0.03 | 0.81 | 0.64 | 0.44 |
| 452 | K150V | 150 | 0.22 | 1.18 | 0.32 | 0.57 | 0.43 |
| 453 | K150L | 150 | 0.5 | 0.69 | 0.45 | 0.55 | 0.1 |
| 454 | K150Y | 150 | 0.29 | −0.08 | 1.34 | 0.52 | 0.6 |
| 455 | T151E | 151 | 0.67 | 0.75 | 0.75 | 0.72 | 0.03 |
| 456 | T151C | 151 | 0.5 | 0.9 | 0.36 | 0.59 | 0.23 |
| 457 | T151V | 151 | 0.55 | 0.67 | 0.45 | 0.56 | 0.09 |
| 458 | T151Q | 151 | 0.47 | 0.42 | 0.63 | 0.51 | 0.09 |
| 459 | V153K | 153 | 0.49 | 0.85 | 0.84 | 0.73 | 0.17 |
| 460 | I154P | 154 | 1.04 | 1.04 | 0.96 | 1.01 | 0.04 |
| 461 | I154E | 154 | 1.07 | 0.5 | 0.74 | 0.77 | 0.23 |
| 462 | I154A | 154 | 0.72 | 0.41 | 0.55 | 0.56 | 0.13 |
| 463 | I154Q | 154 | 0.75 | 0.33 | 0.27 | 0.45 | 0.22 |
| 464 | I154H | 154 | 0.33 | 0.4 | 0.55 | 0.43 | 0.09 |
| 465 | L156C | 156 | 0.59 | 0.25 | 0.43 | 0.43 | 0.14 |
| 466 | S158N | 158 | 1.14 | 0.84 | 0.92 | 0.97 | 0.13 |
| 467 | S158G | 158 | 0.75 | 0.58 | 0.83 | 0.72 | 0.1 |
| 468 | S158K | 158 | 0.46 | 0.55 | 0.49 | 0.5 | 0.04 |
| 469 | S158D | 158 | 0.37 | 0.48 | 0.55 | 0.47 | 0.08 |
| 470 | F160H | 160 | 0.91 | 0.29 | 0.71 | 0.64 | 0.26 |
| 471 | S163I | 163 | 0.71 | 0.83 | 0.72 | 0.75 | 0.06 |
| 472 | F164Q | 164 | 0.55 | 1.08 | 0.36 | 0.67 | 0.31 |
| 473 | K165Y | 165 | 0.32 | 0.72 | 0.5 | 0.52 | 0.16 |
| 474 | Y167M | 167 | 0.66 | 0.86 | 0.64 | 0.72 | 0.1 |
| 475 | Y167I | 167 | 0.62 | 0.51 | 0.91 | 0.68 | 0.17 |
| 476 | Y167L | 167 | 0.46 | 0.47 | 0.54 | 0.49 | 0.03 |
| 477 | K169C | 169 | 0.81 | 0.78 | 0.87 | 0.82 | 0.03 |
| 478 | K169F | 169 | 0.7 | 0.64 | 0.65 | 0.66 | 0.03 |
| 479 | A172Y | 172 | 0.22 | 1 | 1.42 | 0.88 | 0.5 |
| 480 | C174V | 174 | 0.47 | 0.7 | 0.8 | 0.66 | 0.14 |
| 481 | C174T | 174 | 0.78 | 0.44 | 0.67 | 0.63 | 0.14 |
| 482 | C174I | 174 | 0.37 | 0.46 | 0.51 | 0.45 | 0.06 |
| 483 | A177W | 177 | 1 | 0.31 | 0.63 | 0.65 | 0.28 |
| 484 | A177M | 177 | 0.42 | 0.42 | 0.44 | 0.43 | 0.01 |
| 485 | D178R | 178 | 0.73 | 0.57 | 0.59 | 0.63 | 0.07 |
| 486 | D179W | 179 | 0.71 | 0.78 | 0.81 | 0.76 | 0.04 |
| 487 | D179P | 179 | 0.34 | 0.23 | 0.7 | 0.42 | 0.2 |
| 488 | S181N | 181 | 0.38 | 0.39 | 0.99 | 0.58 | 0.29 |
| 489 | S181H | 181 | 0.84 | 0.76 | −0.04 | 0.52 | 0.4 |
| 490 | S181V | 181 | 0.42 | 0.38 | 0.54 | 0.45 | 0.07 |
| 491 | S184I | 184 | 1.57 | 1.58 | 1.65 | 1.6 | 0.03 |
| 492 | S184M | 184 | 1.34 | 1 | 1.36 | 1.23 | 0.16 |
| 493 | S184V | 184 | 0.59 | 0.64 | 0.75 | 0.66 | 0.07 |
| 494 | S184L | 184 | 0.34 | 0.52 | 0.5 | 0.45 | 0.08 |
| 495 | S184C | 184 | 0.57 | 0.52 | 0.2 | 0.43 | 0.16 |
| 496 | I188W | 188 | 1.14 | 0.72 | 0.72 | 0.86 | 0.2 |
| 497 | I188A | 188 | 0.86 | 0.59 | 0.88 | 0.78 | 0.13 |
| 498 | I188C | 188 | 0.6 | 0.52 | 0.59 | 0.57 | 0.04 |
| 499 | N190Q | 190 | 1.14 | 0.31 | 0.91 | 0.79 | 0.35 |
| 500 | N190R | 190 | 0.36 | 1.51 | 0.25 | 0.71 | 0.57 |
| 501 | N192G | 192 | 0.69 | 0.71 | 0.79 | 0.73 | 0.05 |
| 502 | N192C | 192 | 0.84 | 0.16 | 0.35 | 0.45 | 0.29 |
| 503 | A193H | 193 | 0.8 | 0.74 | 0.92 | 0.82 | 0.07 |
| 504 | A193F | 193 | 0.73 | 0.64 | 0.58 | 0.65 | 0.06 |
| 505 | A193L | 193 | 0.56 | 0.6 | 0.7 | 0.62 | 0.06 |
| 506 | A193N | 193 | 0.36 | 0.66 | 0.62 | 0.55 | 0.13 |
| 507 | A193Q | 193 | 0.42 | 0.65 | 0.55 | 0.54 | 0.09 |
| 508 | I195W | 195 | 0.64 | 0.57 | 0.46 | 0.56 | 0.07 |
| 509 | F196T | 196 | 0.57 | 0.27 | 0.52 | 0.45 | 0.13 |
| 510 | F197E | 197 | 0.63 | 0.73 | 0.66 | 0.67 | 0.05 |
| 511 | F197R | 197 | 0.61 | 0.58 | 0.5 | 0.56 | 0.05 |
| 512 | F197K | 197 | 0.58 | 0.48 | 0.62 | 0.56 | 0.06 |
| 513 | F197H | 197 | 0.38 | 0.59 | 0.42 | 0.46 | 0.09 |
| 514 | F197Q | 197 | 0.45 | 0.24 | 0.6 | 0.43 | 0.15 |
| 515 | S198D | 198 | 0.78 | 0.59 | 0.64 | 0.67 | 0.08 |
| 516 | S198E | 198 | 0.28 | 0.68 | 0.56 | 0.51 | 0.17 |
| 517 | S198K | 198 | 0.14 | 0.72 | 0.66 | 0.51 | 0.26 |
| 518 | S198N | 198 | −0.25 | 0.49 | 1.27 | 0.5 | 0.62 |
| 519 | A200H | 200 | 1.32 | 1.42 | 1.44 | 1.39 | 0.05 |
| 520 | A200I | 200 | 0.22 | 1.11 | 0.52 | 0.62 | 0.37 |
| 521 | V202H | 202 | 1.83 | 2.1 | 0.73 | 1.55 | 0.59 |
| 522 | V202C | 202 | 0.44 | 0.63 | 0.67 | 0.58 | 0.1 |
| 523 | R205M | 205 | 0.72 | 1.61 | 1.65 | 1.33 | 0.43 |
| 524 | R205T | 205 | 0.37 | 0.6 | 0.44 | 0.47 | 0.1 |
| 525 | R205C | 205 | 0.69 | 0.26 | 0.32 | 0.42 | 0.19 |
| 526 | I206Y | 206 | 0.72 | 0.75 | 1.08 | 0.85 | 0.16 |
| 527 | I206W | 206 | 1.1 | 0.1 | 0.35 | 0.52 | 0.43 |
| 528 | I206D | 206 | 0.99 | 0.13 | 0.44 | 0.52 | 0.36 |
| 529 | V207W | 207 | 0.42 | 0.4 | 0.54 | 0.46 | 0.06 |
| 530 | S209K | 209 | 0.57 | 0.51 | 0.63 | 0.57 | 0.05 |
| 531 | L210N | 210 | 0.57 | 0.23 | 0.57 | 0.46 | 0.16 |
| 532 | D214T | 214 | 0.36 | 0.62 | 0.76 | 0.58 | 0.17 |
| 533 | D214W | 214 | 0.49 | 0.5 | 0.56 | 0.51 | 0.03 |
| 534 | I215W | 215 | 1.13 | 0.78 | 0.37 | 0.76 | 0.31 |
| 535 | I215A | 215 | 0.26 | 0.31 | 0.73 | 0.43 | 0.21 |
| 536 | N216F | 216 | 0.62 | 0.25 | 0.67 | 0.51 | 0.19 |
| 537 | K217A | 217 | 0.4 | 0.49 | 1.2 | 0.69 | 0.36 |
| 538 | K217D | 217 | 0.4 | 0.64 | 0.73 | 0.59 | 0.14 |
| 539 | K217V | 217 | 0.52 | 0.55 | 0.58 | 0.55 | 0.02 |
| 540 | S219P | 219 | 0.21 | 1.16 | 0.88 | 0.75 | 0.4 |
| 541 | S219F | 219 | −0.07 | 0.71 | 0.85 | 0.5 | 0.41 |
| 542 | S219W | 219 | 1.24 | −0.2 | 0.37 | 0.47 | 0.59 |
| 543 | S219D | 219 | 0.12 | 0.62 | 0.63 | 0.46 | 0.24 |
| 544 | G220Y | 220 | 0.21 | 1 | 0.73 | 0.65 | 0.33 |
| 545 | D221N | 221 | 0.91 | 1 | 1.42 | 1.11 | 0.22 |
| 546 | D221I | 221 | 0.21 | 1 | 1.64 | 0.95 | 0.58 |
| 547 | D221C | 221 | 1.31 | 1.26 | 0.03 | 0.87 | 0.59 |
| 548 | D221R | 221 | 0.57 | 0.31 | 0.73 | 0.53 | 0.17 |
| 549 | D221P | 221 | 1 | 0.08 | 0.5 | 0.53 | 0.38 |
| 550 | D221L | 221 | 0.5 | 0.51 | 0.4 | 0.47 | 0.05 |
| 551 | D221S | 221 | −0.14 | 0.78 | 0.62 | 0.42 | 0.4 |
| 552 | M222P | 222 | 0.56 | 0.54 | 0.49 | 0.53 | 0.03 |
| 553 | M222C | 222 | 1.02 | 0.71 | −0.44 | 0.43 | 0.63 |
| 554 | K223F | 223 | 1.92 | 1.81 | 1.13 | 1.62 | 0.35 |
| 555 | K223P | 223 | 1.42 | 1 | 1.5 | 1.3 | 0.22 |
| 556 | K223C | 223 | 0.91 | 1.91 | 0.73 | 1.18 | 0.52 |
| 557 | K223G | 223 | 0.97 | 0.15 | 0.65 | 0.59 | 0.34 |
| 558 | D224H | 224 | −0.48 | 0.71 | 1.13 | 0.45 | 0.68 |
| 559 | S225A | 225 | 0.91 | 0.31 | 0.44 | 0.55 | 0.26 |
| 560 | S225Y | 225 | 0.91 | 1.41 | −0.66 | 0.55 | 0.88 |
| 561 | S225W | 225 | 0.8 | 0.31 | 0.5 | 0.54 | 0.2 |
| 562 | L226D | 226 | 1.06 | 1.51 | 0.73 | 1.1 | 0.32 |
| 563 | L226Y | 226 | 0.83 | 0.84 | 1.22 | 0.97 | 0.18 |
| 564 | E228P | 228 | 0.92 | 0.37 | 0.71 | 0.67 | 0.23 |
| 565 | E228F | 228 | 0.45 | 0.47 | 0.61 | 0.51 | 0.07 |
| 566 | E228W | 228 | 0.25 | 0.44 | 0.71 | 0.47 | 0.19 |
| 567 | E228T | 228 | 0.4 | 0.49 | 0.43 | 0.44 | 0.04 |
| 568 | M229S | 229 | 0.46 | 0.64 | 0.34 | 0.48 | 0.12 |
| 569 | S230G | 230 | 0.87 | 0.38 | 0.6 | 0.61 | 0.2 |
| 570 | S230E | 230 | 0.84 | 0.3 | 0.66 | 0.6 | 0.22 |
| 571 | L231K | 231 | 0.85 | 0.89 | 0.62 | 0.79 | 0.12 |
| 572 | L231D | 231 | 0.55 | 0.64 | 1.13 | 0.77 | 0.26 |
| 573 | L231R | 231 | 1.04 | 0.4 | 0.86 | 0.77 | 0.27 |
| 574 | E233S | 233 | 0.76 | −0.21 | 0.98 | 0.51 | 0.52 |
| 575 | I234W | 234 | 0.9 | 0.7 | 1.28 | 0.96 | 0.24 |
| 576 | I234G | 234 | 1.04 | 0.65 | −0.13 | 0.52 | 0.48 |
| 577 | Y235N | 235 | 0.21 | 1.22 | 1.21 | 0.88 | 0.47 |
| 578 | Y235L | 235 | 1.49 | 0.7 | 0.29 | 0.83 | 0.5 |
| 579 | Y235W | 235 | 1.17 | 0.3 | 0.62 | 0.69 | 0.36 |
| 580 | Y235A | 235 | 0.9 | −0.11 | 1.13 | 0.64 | 0.54 |
| 581 | Y235T | 235 | 0.72 | −0.11 | 0.88 | 0.5 | 0.43 |
| 582 | Y235Q | 235 | 0.21 | 1.22 | 0.03 | 0.48 | 0.52 |
| 583 | S236K | 236 | 1.09 | 0.48 | 1.19 | 0.92 | 0.31 |
| 584 | S236V | 236 | 0.9 | 0.99 | 0.72 | 0.87 | 0.11 |
| 585 | S236W | 236 | 0.56 | 0.86 | 0.59 | 0.67 | 0.14 |
| 586 | S236N | 236 | 1.24 | 0.99 | −0.48 | 0.58 | 0.76 |
| 587 | S236G | 236 | 0.55 | 0.52 | 0.29 | 0.45 | 0.12 |
| 588 | E238F | 238 | 0.37 | 0.51 | 1.15 | 0.68 | 0.34 |
| 589 | E238S | 238 | 0.46 | 0.75 | 0.57 | 0.59 | 0.12 |
| 590 | K239T | 239 | 1.27 | 0.7 | 0.47 | 0.81 | 0.33 |
| 591 | K239V | 239 | 0.62 | 0.39 | 0.61 | 0.54 | 0.1 |
| 592 | K239W | 239 | 0.57 | 0.55 | 0.48 | 0.53 | 0.04 |
| 593 | K239F | 239 | 0.33 | 0.16 | 0.89 | 0.46 | 0.31 |
| 594 | K239G | 239 | 0.5 | 0.12 | 0.72 | 0.44 | 0.25 |
| 595 | G241P | 241 | 2.15 | 0.66 | 0.38 | 1.06 | 0.77 |
| 596 | G241M | 241 | 1.07 | 1.2 | 0.76 | 1.01 | 0.18 |
| 597 | G241Q | 241 | 0.84 | 1.17 | 0.78 | 0.93 | 0.17 |
| 598 | G241W | 241 | 0.18 | 0.55 | 1.05 | 0.6 | 0.36 |
| 599 | G241H | 241 | 0.39 | 0.4 | 0.77 | 0.52 | 0.18 |
| 600 | G241F | 241 | 0.6 | 0.72 | 0.15 | 0.49 | 0.25 |
| 601 | F243R | 243 | 1.02 | 0.99 | 1.04 | 1.02 | 0.02 |
| 602 | F243H | 243 | 0.21 | 1.28 | 0.18 | 0.55 | 0.51 |
| 603 | I244Y | 244 | 1.22 | 1.31 | 0.84 | 1.12 | 0.2 |
| 604 | I244Q | 244 | 1.39 | 0.01 | 1.2 | 0.87 | 0.61 |
| 605 | I244G | 244 | 0.8 | 0.83 | 0.61 | 0.75 | 0.09 |
| 606 | I244F | 244 | 0.69 | 0.53 | 0.45 | 0.55 | 0.1 |
| 607 | I244W | 244 | 0.72 | 0.4 | 0.31 | 0.48 | 0.18 |
| 608 | T245Q | 245 | 1.41 | 1.14 | 1.41 | 1.32 | 0.13 |
| 609 | T245E | 245 | 0.9 | 0.99 | 1.12 | 1 | 0.09 |
| 610 | T245L | 245 | 1.15 | 0.61 | 1.2 | 0.99 | 0.27 |
| 611 | T245Y | 245 | 1.17 | 0.16 | 0.83 | 0.72 | 0.42 |
| 612 | T245V | 245 | 0.31 | 0.74 | 0.46 | 0.5 | 0.17 |
| 613 | T245K | 245 | 0.03 | 0.58 | 0.8 | 0.47 | 0.32 |
| 614 | E247T | 247 | 1.12 | 0.37 | 1.2 | 0.9 | 0.37 |
| 615 | E247M | 247 | 0.88 | 0.57 | 0.51 | 0.65 | 0.16 |
| 616 | E247C | 247 | 0.9 | 0.85 | −0.11 | 0.54 | 0.47 |
| 617 | E247I | 247 | 0.7 | 0.67 | −0.02 | 0.45 | 0.33 |
| 618 | G248M | 248 | 0.86 | 0.48 | 0.71 | 0.68 | 0.16 |
| 619 | G248K | 248 | 0.35 | 0.51 | 0.51 | 0.46 | 0.07 |
| 620 | S250N | 250 | 0.61 | 0.96 | 0.94 | 0.84 | 0.16 |
| 621 | N253Q | 253 | 1.71 | 1.21 | 1.41 | 1.44 | 0.21 |
| 622 | N253G | 253 | 1.12 | 1.54 | 0.72 | 1.13 | 0.34 |
| 623 | N253W | 253 | 1.12 | 0.7 | 0.58 | 0.8 | 0.23 |
| 624 | N253A | 253 | 1.06 | 0.29 | 1 | 0.78 | 0.35 |
| 625 | D254Q | 254 | 1.31 | 0.98 | 1.41 | 1.23 | 0.18 |
| 626 | D254S | 254 | 1.01 | 0.94 | 0.96 | 0.97 | 0.03 |
| 627 | D254W | 254 | 1.31 | 0.29 | 1.04 | 0.88 | 0.43 |
| 628 | D254I | 254 | 1.46 | 0.29 | 0.03 | 0.59 | 0.62 |
| 629 | D254R | 254 | 0.03 | 0.7 | 0.87 | 0.53 | 0.36 |
| 630 | D254M | 254 | 1.53 | 0.7 | −0.67 | 0.52 | 0.91 |
| 631 | C256Q | 256 | 0.43 | 0.74 | 0.62 | 0.6 | 0.13 |
| 632 | C256H | 256 | 0.56 | 0.3 | 0.77 | 0.54 | 0.19 |
| 633 | C256E | 256 | 0.4 | 0.61 | 0.46 | 0.49 | 0.09 |
| 634 | C256N | 256 | 0.6 | 0.3 | 0.51 | 0.47 | 0.13 |
| 635 | C256M | 256 | 0.49 | 0.54 | 0.38 | 0.47 | 0.07 |
| 636 | K258L | 258 | 0.69 | 0.52 | 0.3 | 0.51 | 0.16 |
| 637 | V259Y | 259 | 1.81 | 1.39 | 1.41 | 1.54 | 0.2 |
| 638 | V259Q | 259 | 0.21 | 0.29 | 1.63 | 0.71 | 0.65 |
| 639 | V259N | 259 | 0.9 | 0.29 | 0.72 | 0.63 | 0.26 |
| 640 | S261H | 261 | 0.9 | 0.29 | 0.87 | 0.68 | 0.28 |
| 641 | S261F | 261 | 0.36 | 1.06 | 0.18 | 0.53 | 0.38 |
| 642 | F262R | 262 | 1.67 | 1.83 | 1.22 | 1.57 | 0.26 |
| 643 | F262P | 262 | 1.59 | 0.28 | 1.12 | 1 | 0.54 |
| 644 | F262K | 262 | 1.45 | 0.51 | 0.58 | 0.85 | 0.43 |
| 645 | F262G | 262 | 0.42 | 0.69 | 1.03 | 0.71 | 0.25 |
| 646 | M263E | 263 | 0.87 | 0.41 | 0.64 | 0.64 | 0.19 |
| 647 | M263C | 263 | 0.64 | 0.63 | 0.53 | 0.6 | 0.05 |
| 648 | M263S | 263 | 0.53 | 0.45 | 0.27 | 0.42 | 0.11 |
| 649 | L265W | 265 | 1.59 | −0.3 | 0.89 | 0.73 | 0.78 |
| 650 | L265K | 265 | 0.61 | 0.59 | 0.43 | 0.54 | 0.08 |
| 651 | Y266R | 266 | 0.2 | 3.72 | 0.71 | 1.54 | 1.55 |
| 652 | Y266E | 266 | 0.81 | 0.79 | 0.31 | 0.64 | 0.23 |
| 653 | Y266P | 266 | 0.9 | −0.12 | 0.53 | 0.43 | 0.42 |
| 654 | C267K | 267 | 1.12 | 1.2 | 1.63 | 1.31 | 0.22 |
| 655 | C267M | 267 | 0.61 | 1.38 | 0.65 | 0.88 | 0.36 |
| 656 | C267E | 267 | 0.89 | 1.38 | 0.31 | 0.86 | 0.44 |
| 657 | C267T | 267 | 0.85 | 0.2 | 0.62 | 0.56 | 0.27 |
| 658 | C267P | 267 | 0.81 | 0.28 | 0.53 | 0.54 | 0.21 |
| 659 | Q268C | 268 | 1.08 | 1.45 | 1.05 | 1.19 | 0.18 |
| 660 | Q268G | 268 | 0.71 | 1.13 | 0.53 | 0.79 | 0.25 |
| 661 | Q268V | 268 | 1.01 | 1.2 | 0.02 | 0.74 | 0.52 |
| 662 | K269Y | 269 | 0.2 | 0.42 | 1.02 | 0.55 | 0.35 |
| 663 | N270G | 270 | 0.65 | 0.82 | 1.63 | 1.03 | 0.43 |
| 664 | N270E | 270 | 0.74 | 0.9 | 0.15 | 0.6 | 0.32 |
| 665 | K271W | 271 | 0.63 | 0.8 | 0.78 | 0.73 | 0.07 |
| 666 | K271H | 271 | 0.61 | 0.98 | 0.42 | 0.67 | 0.23 |
| 667 | K271C | 271 | −0.2 | 0.98 | 1 | 0.59 | 0.56 |
| 668 | K271I | 271 | 1.05 | 0.1 | 0.42 | 0.52 | 0.39 |
| 669 | E272S | 272 | 0.9 | 1.38 | 1.4 | 1.23 | 0.24 |
| 670 | E272P | 272 | 0.2 | 0.98 | 0.93 | 0.71 | 0.36 |
| 671 | E272K | 272 | 0.98 | 0.69 | 0.31 | 0.66 | 0.27 |
| 672 | E272G | 272 | 0.49 | −0.12 | 1.12 | 0.5 | 0.51 |
| 673 | E272Y | 272 | 0.71 | 0.57 | 0.02 | 0.43 | 0.3 |
| 674 | N273R | 273 | 0.65 | 0.56 | 0.47 | 0.56 | 0.08 |
| 675 | N273I | 273 | 0.49 | 1.13 | 0.02 | 0.55 | 0.46 |
| 676 | N273S | 273 | 0.46 | 0.25 | 0.91 | 0.54 | 0.28 |
| 677 | N275G | 275 | 0.36 | 0.61 | 0.75 | 0.57 | 0.16 |
| 678 | L276K | 276 | 1.12 | 1.2 | 1.97 | 1.43 | 0.38 |
| 679 | L276N | 276 | 1.45 | 0.98 | 0.42 | 0.95 | 0.42 |
| 680 | Y277P | 277 | 1.3 | 1.2 | 1.48 | 1.33 | 0.12 |
| 681 | Y277L | 277 | 0.83 | 0.59 | 0.2 | 0.54 | 0.26 |
| 682 | Y277M | 277 | 0.8 | 0.08 | 0.39 | 0.42 | 0.29 |
| 683 | K278W | 278 | 1.74 | 0.98 | 0.42 | 1.05 | 0.54 |
| 684 | K278A | 278 | 0.67 | 1.07 | 0.71 | 0.82 | 0.18 |
| 685 | K278P | 278 | 0.45 | 0.98 | 0.71 | 0.71 | 0.21 |
| 686 | K278S | 278 | 0.85 | 0.69 | 0.22 | 0.59 | 0.26 |
| 687 | K278F | 278 | −0.09 | 0.84 | 0.83 | 0.53 | 0.43 |
| 688 | K278L | 278 | 0.49 | 0.35 | 0.51 | 0.45 | 0.07 |
| 689 | Q280M | 280 | 0.89 | 0.5 | 0.58 | 0.66 | 0.17 |
| 690 | Q280D | 280 | 0.32 | 0.97 | 0.34 | 0.54 | 0.31 |
| 691 | K281G | 281 | 1.05 | 0.87 | 0.77 | 0.9 | 0.11 |
| 692 | K281F | 281 | 0.76 | 0.28 | 1.27 | 0.77 | 0.4 |
| 693 | K281D | 281 | −0.61 | 0.48 | 2.2 | 0.69 | 1.16 |
| 694 | L282S | 282 | −0.06 | 0.08 | 1.27 | 0.43 | 0.6 |
| 695 | L282K | 282 | 0.71 | 0.16 | 0.38 | 0.42 | 0.22 |
| 696 | H283M | 283 | 1.08 | 0.91 | 0.45 | 0.81 | 0.27 |
| 697 | Q285M | 285 | 1.44 | 1.52 | 2.1 | 1.68 | 0.29 |
| 698 | Q285T | 285 | −0.76 | 0.71 | 1.95 | 0.64 | 1.11 |
| 699 | I286C | 286 | 1.45 | 0.28 | 0.71 | 0.81 | 0.48 |
| 700 | C288G | 288 | 0.57 | 0.69 | 0.57 | 0.61 | 0.06 |
| 701 | C288K | 288 | 0.56 | 0.42 | 0.57 | 0.52 | 0.07 |
| 702 | I289W | 289 | 0.87 | 0.66 | 0.33 | 0.62 | 0.22 |
| 703 | A290K | 290 | 0.59 | 0.54 | 0.37 | 0.5 | 0.09 |
| 704 | A290I | 290 | 0.28 | 0.69 | 0.35 | 0.44 | 0.18 |
| 705 | A290N | 290 | 0.68 | 0.59 | 0.01 | 0.43 | 0.29 |
| 706 | A290R | 290 | 0.15 | 0.38 | 0.72 | 0.42 | 0.23 |
| 707 | D291T | 291 | 1.21 | 0.46 | 1.87 | 1.18 | 0.57 |
| 708 | D291M | 291 | 0.85 | 0.63 | 0.76 | 0.75 | 0.09 |
| 709 | D291N | 291 | 0.63 | 0.68 | 0.77 | 0.7 | 0.06 |
| 710 | D291F | 291 | 0.49 | 0.75 | 0.8 | 0.68 | 0.14 |
| 711 | D291P | 291 | 0.48 | 0.36 | 1.08 | 0.64 | 0.32 |
| 712 | D291L | 291 | 0.63 | 0.62 | 0.29 | 0.51 | 0.16 |
| 713 | D291W | 291 | 0.52 | 0.69 | 0.3 | 0.5 | 0.16 |
| 714 | T292H | 292 | 0.42 | 0.46 | 0.54 | 0.47 | 0.05 |
| 715 | S293K | 293 | 0.89 | 0.64 | 0.61 | 0.71 | 0.12 |
| 716 | S293W | 293 | 0.19 | 0.46 | 1.02 | 0.56 | 0.35 |
| 717 | S293H | 293 | 0.38 | 0.66 | 0.52 | 0.52 | 0.12 |
| 718 | Y294L | 294 | 0.25 | 0.34 | 0.88 | 0.49 | 0.28 |
| 719 | Y294M | 294 | 0.74 | 0.37 | 0.31 | 0.47 | 0.19 |
| 720 | Y294V | 294 | 0.55 | 0.37 | 0.46 | 0.46 | 0.07 |
| 721 | E295C | 295 | 0.19 | 0.24 | 2.85 | 1.09 | 1.24 |
| 722 | E295M | 295 | 1.33 | 0.37 | −0.01 | 0.56 | 0.56 |
| 723 | E295T | 295 | 0.64 | 0.58 | 0.36 | 0.52 | 0.12 |
| 724 | E295R | 295 | 0.49 | 0.55 | 0.46 | 0.5 | 0.04 |
| 725 | V296Q | 296 | 1.25 | 1.08 | 1.03 | 1.12 | 0.09 |
| 726 | V296R | 296 | 0.95 | 1.13 | 0.97 | 1.02 | 0.08 |
| 727 | V296N | 296 | 1.05 | 0.71 | 1.05 | 0.93 | 0.16 |
| 728 | V296P | 296 | 0.63 | 1.13 | 0.9 | 0.89 | 0.21 |
| 729 | V296H | 296 | 0.81 | 0.92 | 0.81 | 0.85 | 0.05 |
| 730 | V296W | 296 | 0.8 | 1.01 | 0.58 | 0.8 | 0.17 |
| 731 | V296K | 296 | 0.45 | 0.72 | 0.73 | 0.63 | 0.13 |
| 732 | V296D | 296 | 0.65 | 0.74 | 0.39 | 0.59 | 0.15 |
| 733 | V296T | 296 | 0.65 | 0.49 | 0.53 | 0.56 | 0.07 |
| 734 | V296Y | 296 | 0.7 | 0.54 | 0.35 | 0.53 | 0.14 |
| 735 | V296A | 296 | 0.47 | 0.44 | 0.64 | 0.52 | 0.09 |
| 736 | V296M | 296 | 0.76 | 0.45 | 0.31 | 0.5 | 0.19 |
| 737 | V296G | 296 | 0.38 | 0.43 | 0.48 | 0.43 | 0.04 |
| 738 | P297F | 297 | 1.34 | 1.36 | 1.49 | 1.4 | 0.07 |
| 739 | P297I | 297 | 1.46 | 0.88 | 0.93 | 1.09 | 0.26 |
| 740 | P297C | 297 | 1.26 | 1 | 0.7 | 0.99 | 0.23 |
| 741 | P297V | 297 | 0.85 | 0.76 | 1.06 | 0.89 | 0.12 |
| 742 | P297W | 297 | 0.83 | 0.91 | 0.91 | 0.88 | 0.04 |
| 743 | P297H | 297 | 0.76 | 0.73 | 0.52 | 0.67 | 0.11 |
| 744 | P297N | 297 | 0.77 | 0.64 | 0.53 | 0.64 | 0.1 |
| 745 | P297M | 297 | 0.69 | 0.5 | 0.6 | 0.59 | 0.08 |
| 746 | P297K | 297 | 0.54 | 0.61 | 0.56 | 0.57 | 0.03 |
| 747 | P297Y | 297 | 0.52 | 0.5 | 0.66 | 0.56 | 0.07 |
| 748 | P297R | 297 | 0.49 | 0.47 | 0.37 | 0.45 | 0.05 |
| 749 | K299P | 299 | 1.54 | 1.62 | 1.65 | 1.6 | 0.05 |
| 750 | K299E | 299 | 0.84 | 0.97 | 1.09 | 0.97 | 0.1 |
| 751 | K299G | 299 | 1.12 | 0.71 | 0.95 | 0.93 | 0.17 |
| 752 | K299A | 299 | 0.87 | 0.7 | 0.76 | 0.78 | 0.07 |
| 753 | K299W | 299 | 0.78 | 0.52 | 0.56 | 0.62 | 0.12 |
| 754 | K299V | 299 | 0.54 | 0.66 | 0.65 | 0.62 | 0.06 |
| 755 | F300E | 300 | 0.98 | 0.95 | 1.12 | 1.02 | 0.07 |
| 756 | F300K | 300 | 1.05 | 1.04 | 0.66 | 0.92 | 0.18 |
| 757 | F300M | 300 | 0.53 | 0.74 | 0.59 | 0.62 | 0.09 |
| 758 | F300Q | 300 | 0.8 | 0.71 | 0.22 | 0.58 | 0.26 |
| 759 | F300D | 300 | 0.71 | 0.34 | 0.37 | 0.47 | 0.17 |
| 760 | E301G | 301 | 1.94 | 1.88 | 2.02 | 1.95 | 0.06 |
| 761 | E301W | 301 | 1.42 | 1.71 | 1.45 | 1.53 | 0.13 |
| 762 | E301P | 301 | 1.58 | 1.48 | 0.99 | 1.35 | 0.26 |
| 763 | E301Q | 301 | 1.11 | 1.38 | 1.4 | 1.29 | 0.13 |
| 764 | E301M | 301 | 0.89 | 0.28 | 1.96 | 1.04 | 0.69 |
| 765 | E301A | 301 | 0.93 | 0.45 | 1.35 | 0.91 | 0.37 |
| 766 | E301K | 301 | 0.6 | 0.84 | 1.26 | 0.9 | 0.28 |
| 767 | E301R | 301 | 0.57 | 1.45 | 0.39 | 0.8 | 0.47 |
| 768 | E301F | 301 | 0.98 | 0.46 | 0.7 | 0.72 | 0.21 |
| 769 | E301C | 301 | 0.29 | 0.87 | 0.84 | 0.67 | 0.27 |
| 770 | E301T | 301 | 0.89 | 1.67 | −0.68 | 0.62 | 0.98 |
| 771 | S302I | 302 | 2.18 | 2.07 | 2.31 | 2.19 | 0.1 |
| 772 | S302D | 302 | 1.49 | 2.23 | 1.86 | 1.86 | 0.3 |
| 773 | S302V | 302 | 1.67 | 1.84 | 1.66 | 1.72 | 0.08 |
| 774 | S302G | 302 | 1.44 | 1.14 | 1.6 | 1.39 | 0.19 |
| 775 | S302E | 302 | 1.58 | 0.84 | 1.57 | 1.33 | 0.35 |
| 776 | S302M | 302 | 1.58 | 1.67 | 0.48 | 1.24 | 0.54 |
| 777 | S302A | 302 | 0.85 | 1.18 | 0.89 | 0.97 | 0.15 |
| 778 | S302W | 302 | 1.08 | 0.77 | 0.97 | 0.94 | 0.13 |
| 779 | S302N | 302 | 0.64 | 0.82 | 1.01 | 0.82 | 0.15 |
| 780 | S302C | 302 | 0.48 | 0.97 | 0.52 | 0.66 | 0.22 |
| 781 | S302H | 302 | 0.89 | 0.28 | 0.7 | 0.62 | 0.25 |
| 782 | D303C | 303 | 3.03 | 3.65 | 3.23 | 3.3 | 0.26 |
| 783 | D303M | 303 | 3.14 | 3.09 | 2.97 | 3.07 | 0.07 |
| 784 | D303F | 303 | 2.59 | 2.84 | 2.71 | 2.71 | 0.1 |
| 785 | D303Y | 303 | 2.02 | 2.05 | 1.96 | 2.01 | 0.04 |
| 786 | D303S | 303 | 1.93 | 1.97 | 1.96 | 1.95 | 0.02 |
| 787 | D303I | 303 | 1.47 | 1.72 | 1.58 | 1.59 | 0.1 |
| 788 | D303R | 303 | 1.54 | 1.66 | 1.34 | 1.51 | 0.13 |
| 789 | D303W | 303 | 1.23 | 1.6 | 1.48 | 1.44 | 0.15 |
| 790 | D303P | 303 | 1.46 | 1.6 | 1.22 | 1.43 | 0.15 |
| 791 | D303V | 303 | 1.55 | 1.2 | 1.26 | 1.34 | 0.15 |
| 792 | D303Q | 303 | 1.14 | 1.32 | 1.35 | 1.27 | 0.09 |
| 793 | D303G | 303 | 1 | 1.27 | 1.18 | 1.15 | 0.11 |
| 794 | D303H | 303 | 1.09 | 1.13 | 1.18 | 1.13 | 0.04 |
| 795 | D303K | 303 | 0.76 | 1.09 | 1.12 | 0.99 | 0.16 |
| 796 | D303N | 303 | 0.63 | 0.72 | 0.76 | 0.7 | 0.05 |
| 797 | E304T | 304 | 0.69 | 0.61 | 0.76 | 0.69 | 0.06 |
| 798 | E305W | 305 | 1.98 | 1.85 | 2.18 | 2.01 | 0.14 |
| 799 | E305C | 305 | 1.39 | 1.75 | 1.9 | 1.68 | 0.22 |
| 800 | E305F | 305 | 1.61 | 1.56 | 1.64 | 1.6 | 0.03 |
| 801 | E305S | 305 | 1.51 | 1.46 | 1.69 | 1.55 | 0.1 |
| 802 | E305Y | 305 | 1.58 | 1.47 | 1.48 | 1.51 | 0.05 |
| 803 | E305L | 305 | 1.46 | 1.44 | 1.4 | 1.44 | 0.03 |
| 804 | E305A | 305 | 1.26 | 1.41 | 1.5 | 1.39 | 0.1 |
| 805 | E305K | 305 | 1.42 | 1.27 | 1.28 | 1.33 | 0.07 |
| 806 | E3051 | 305 | 1.48 | 1.31 | 1.15 | 1.31 | 0.13 |
| 807 | E305V | 305 | 1.37 | 1.33 | 1.18 | 1.3 | 0.08 |
| 808 | E305G | 305 | 1.19 | 1.21 | 1.49 | 1.29 | 0.14 |
| 809 | E305M | 305 | 1.2 | 0.87 | 1.04 | 1.04 | 0.14 |
| 810 | E305R | 305 | 1.08 | 0.87 | 0.97 | 0.97 | 0.09 |
| 811 | E305N | 305 | 0.68 | 0.59 | 1.11 | 0.79 | 0.23 |
| 812 | E305P | 305 | 0.43 | 0.6 | 0.59 | 0.54 | 0.08 |
| 813 | E305H | 305 | −0.08 | 1.04 | 0.43 | 0.46 | 0.46 |
| 814 | V306W | 306 | 2.13 | 1.38 | 1.39 | 1.63 | 0.35 |
| 815 | V306Y | 306 | 1.69 | 0.68 | 0.7 | 1.02 | 0.47 |
| 816 | V306F | 306 | 1.17 | −0.13 | 0.38 | 0.47 | 0.53 |
| 817 | V306C | 306 | 0.23 | 0.72 | 0.32 | 0.43 | 0.21 |
| 818 | Y307Q | 307 | 1.88 | 2.18 | 2.02 | 2.03 | 0.12 |
| 819 | Y307K | 307 | 1.87 | 2.01 | 2.02 | 1.97 | 0.07 |
| 820 | Y307E | 307 | 1.83 | 2.04 | 1.94 | 1.94 | 0.09 |
| 821 | Y307R | 307 | 1.77 | 1.67 | 2.01 | 1.82 | 0.14 |
| 822 | Y307G | 307 | 1.81 | 1.72 | 1.86 | 1.8 | 0.06 |
| 823 | Y307A | 307 | 1.61 | 1.69 | 1.78 | 1.69 | 0.07 |
| 824 | Y307T | 307 | 1.62 | 1.72 | 1.68 | 1.68 | 0.04 |
| 825 | Y307I | 307 | 1.53 | 1.53 | 1.33 | 1.46 | 0.09 |
| 826 | Y307L | 307 | 1.26 | 1.1 | 1.25 | 1.2 | 0.08 |
| 827 | Y307W | 307 | 0.97 | 1.24 | 1.37 | 1.19 | 0.17 |
| 828 | Y307V | 307 | 1.08 | 1.17 | 1.15 | 1.13 | 0.04 |
| 829 | Y307S | 307 | 0.83 | 0.97 | 0.97 | 0.92 | 0.06 |
| 830 | Y307P | 307 | 0.92 | 0.52 | 0.71 | 0.72 | 0.16 |
| 831 | Y307D | 307 | 0.72 | 0.58 | 0.64 | 0.64 | 0.06 |
| 832 | Y307N | 307 | 0.4 | 0.54 | 0.48 | 0.47 | 0.06 |
| 833 | Q308I | 308 | 1.29 | 1.09 | 0.57 | 0.98 | 0.3 |
| 834 | Q308W | 308 | 0.53 | 0.54 | 0.51 | 0.53 | 0.01 |
| 835 | S309M | 309 | 0.57 | 0.95 | 0.81 | 0.78 | 0.15 |
| 836 | S309L | 309 | 0.44 | 0.68 | 0.49 | 0.54 | 0.1 |
| 837 | S309K | 309 | 0.52 | 0.36 | 0.61 | 0.5 | 0.1 |
| 838 | S309V | 309 | 0.5 | 0.22 | 0.59 | 0.43 | 0.16 |
| 839 | V310Y | 310 | 1.43 | 1.46 | 1.35 | 1.42 | 0.05 |
| 840 | N311F | 311 | 1.24 | 0.88 | 0.75 | 0.96 | 0.21 |
| 841 | N311L | 311 | 0.67 | 0.76 | 0.67 | 0.7 | 0.04 |
| 842 | G312I | 312 | 1.79 | 1.38 | 1.62 | 1.59 | 0.17 |
| 843 | G312T | 312 | 1.21 | 0.46 | 1.04 | 0.9 | 0.32 |
| 844 | G312E | 312 | 1.28 | 1.38 | 0.01 | 0.89 | 0.62 |
| 845 | G312S | 312 | 0.47 | 1.05 | 0.41 | 0.64 | 0.29 |
| 846 | G312Q | 312 | 0.87 | 0.97 | 0.01 | 0.62 | 0.43 |
| 847 | G312A | 312 | 0.6 | 0.53 | 0.52 | 0.55 | 0.03 |
| 848 | G312K | 312 | −0.22 | 0.79 | 0.7 | 0.42 | 0.46 |
| 849 | F313H | 313 | 0.76 | 0.16 | 0.9 | 0.6 | 0.32 |
| 850 | F313M | 313 | 0.29 | 0.43 | 0.76 | 0.49 | 0.19 |
| 851 | D315M | 315 | 0.52 | 1.3 | 0.59 | 0.8 | 0.36 |
| 852 | D315I | 315 | 1.05 | 0.05 | 0.79 | 0.63 | 0.42 |
| 853 | I317W | 317 | 0.5 | 0.64 | 0.49 | 0.54 | 0.07 |
| 854 | S318K | 318 | 0.8 | 0.58 | 0.54 | 0.64 | 0.11 |
| 855 | S318D | 318 | 0.54 | 0.69 | 0.3 | 0.51 | 0.16 |
| 856 | S319K | 319 | 0.55 | 0.84 | 0.35 | 0.58 | 0.2 |
| 857 | S319I | 319 | 0.87 | −0.13 | 0.79 | 0.51 | 0.46 |
| 858 | S319N | 319 | −0.02 | 0.84 | 0.6 | 0.48 | 0.36 |
| 859 | K320F | 320 | 0.82 | 0.74 | 0.26 | 0.61 | 0.25 |
| 860 | H321V | 321 | 0.38 | 0.71 | 0.94 | 0.68 | 0.23 |
| 861 | H321F | 321 | 0.72 | 0.18 | 0.94 | 0.61 | 0.32 |
| 862 | I322A | 322 | 0.78 | 0.77 | 0.74 | 0.76 | 0.02 |
| 863 | E324W | 324 | 1.97 | 2.35 | 1.79 | 2.04 | 0.23 |
| 864 | E324C | 324 | 0.18 | 2.7 | 0.77 | 1.22 | 1.08 |
| 865 | E324Y | 324 | 0.78 | 0.43 | 0.77 | 0.66 | 0.17 |
| 866 | E324M | 324 | 0.87 | 0.49 | 0.22 | 0.53 | 0.26 |
| 867 | E324T | 324 | 0.18 | 0.35 | 0.77 | 0.43 | 0.25 |
| 868 | R325K | 325 | 0.17 | 0.78 | 0.69 | 0.55 | 0.27 |
| 869 | R327V | 327 | 0.76 | 0.4 | 0.55 | 0.57 | 0.15 |
| 870 | R327M | 327 | 0.58 | 0.5 | 0.56 | 0.55 | 0.03 |
| 871 | R327K | 327 | 0.18 | 0.85 | 0.29 | 0.44 | 0.3 |
| 872 | D331M | 331 | 0.84 | 0.78 | 0.58 | 0.73 | 0.11 |
| 873 | D331C | 331 | 0.92 | 0.68 | 0.34 | 0.65 | 0.24 |
| 874 | Y333M | 333 | 0.61 | 0.55 | 0.18 | 0.45 | 0.19 |
| 875 | N334W | 334 | 0.78 | 0.97 | 0.78 | 0.84 | 0.09 |
| 876 | G335Q | 335 | 0.62 | 0.49 | 0.28 | 0.46 | 0.14 |
| 877 | Y336V | 336 | 1.79 | 1.88 | 0.01 | 1.23 | 0.86 |
| 878 | Y336H | 336 | 1.43 | 0.68 | 0.92 | 1.01 | 0.31 |
| 879 | Y336W | 336 | 0.87 | 1.28 | 0.41 | 0.86 | 0.36 |
| 880 | Y336M | 336 | 0.47 | 0.97 | 0.29 | 0.58 | 0.29 |
| 881 | N337G | 337 | 0.89 | 0.51 | 0.33 | 0.58 | 0.23 |
| 882 | D339Q | 339 | 1.28 | −0.42 | 0.7 | 0.52 | 0.7 |
| 883 | D339M | 339 | 0.87 | 0.68 | 0.01 | 0.52 | 0.37 |
| 884 | D339S | 339 | −0.13 | 1.91 | −0.4 | 0.46 | 1.03 |
| 885 | K340E | 340 | 0.69 | 1.12 | 1.47 | 1.09 | 0.32 |
| 886 | K340H | 340 | 1.28 | 0.97 | 0.01 | 0.75 | 0.54 |
| 887 | K340A | 340 | 0.87 | 0.27 | 1.1 | 0.75 | 0.35 |
| 888 | Y342R | 342 | 0.79 | 1.12 | 0.85 | 0.92 | 0.14 |
| 889 | Y342M | 342 | 0.99 | −0.01 | 0.41 | 0.46 | 0.41 |
| 890 | I343V | 343 | −0.51 | 0.97 | 0.85 | 0.44 | 0.67 |
| 891 | V344E | 344 | 1.28 | 0.97 | 1.1 | 1.12 | 0.13 |
| 892 | K346C | 346 | 0.18 | 1.88 | 0.7 | 0.92 | 0.71 |
| 893 | F347R | 347 | 0.87 | 1.66 | 1.61 | 1.38 | 0.36 |
| 894 | F347G | 347 | 0.18 | 0.27 | 0.92 | 0.46 | 0.33 |
| 895 | Y348M | 348 | 1.28 | 1.37 | 0 | 0.88 | 0.62 |
| 896 | Y348V | 348 | 0.18 | 0.27 | 1.39 | 0.61 | 0.55 |
| 897 | E349T | 349 | 2.26 | 0.96 | 1.1 | 1.44 | 0.58 |
| 898 | E349Q | 349 | 1.56 | 0.96 | 1.61 | 1.38 | 0.29 |
| 899 | E349R | 349 | 1.09 | 0.96 | 1.18 | 1.08 | 0.09 |
| 900 | E349N | 349 | 1.09 | 0.68 | 1.25 | 1.01 | 0.24 |
| 901 | E349K | 349 | 0.97 | 0.74 | 0.69 | 0.8 | 0.12 |
| 902 | S350R | 350 | 2.48 | 1.66 | 2.49 | 2.21 | 0.39 |
| 903 | S350H | 350 | 0.58 | 0.96 | 0 | 0.52 | 0.4 |
| 904 | V351K | 351 | 2.12 | 2.35 | 1.61 | 2.03 | 0.31 |
| 905 | V351Y | 351 | 1.28 | 1.19 | 1.71 | 1.39 | 0.23 |
| 906 | V351F | 351 | 1.43 | 0.27 | 1.1 | 0.93 | 0.49 |
| 907 | V351D | 351 | 1.79 | 0.56 | 0 | 0.78 | 0.75 |
| 908 | S352M | 352 | 0.18 | 1.19 | 1.39 | 0.92 | 0.53 |
| 909 | Q353K | 353 | 0.77 | 0.93 | 0.89 | 0.86 | 0.07 |
| 910 | Q353M | 353 | 0.58 | 0.43 | 1.38 | 0.8 | 0.42 |
| 911 | Q353R | 353 | 0.55 | 0.76 | 0.54 | 0.62 | 0.1 |
| 912 | Q353N | 353 | 0.17 | 0.54 | 0.57 | 0.43 | 0.18 |
| 913 | T355M | 355 | 0.83 | 0.47 | 0.4 | 0.57 | 0.19 |
| 914 | Y356M | 356 | 1.56 | 1.19 | 1.25 | 1.33 | 0.16 |
| 915 | Y356V | 356 | 0.96 | 0.86 | 0.79 | 0.87 | 0.07 |
| 916 | Y356G | 356 | −0.11 | 1.37 | 0.69 | 0.65 | 0.61 |
| 917 | Y356I | 356 | 0.06 | 0.85 | 1.02 | 0.64 | 0.42 |
| 918 | Y356C | 356 | 0.51 | 0.27 | 0.95 | 0.58 | 0.28 |
| 919 | Y356A | 356 | 1.16 | 0.02 | 0.51 | 0.56 | 0.46 |
| 920 | Y356E | 356 | −0.05 | 0.61 | 0.69 | 0.42 | 0.33 |
| 921 | R357M | 357 | 0.61 | 0.65 | 0.37 | 0.54 | 0.12 |
| 922 | R357K | 357 | 0.61 | 0.35 | 0.48 | 0.48 | 0.1 |
| 923 | D358R | 358 | 0.41 | 0.76 | 0.69 | 0.62 | 0.15 |
| 924 | D358W | 358 | 0.27 | 0.61 | 0.4 | 0.43 | 0.14 |
| 925 | T361K | 361 | 0.42 | 0.63 | 1.08 | 0.71 | 0.28 |
| 926 | T364W | 364 | 0.37 | 0.25 | 0.72 | 0.45 | 0.2 |
| 927 | A365Y | 365 | 1.04 | 0.8 | 0.14 | 0.66 | 0.38 |
| 928 | A365N | 365 | 0.62 | 0.4 | 0.64 | 0.56 | 0.11 |
| 929 | E367P | 367 | 0.76 | 0.68 | 0.52 | 0.65 | 0.1 |
| 930 | E367M | 367 | 0.58 | 0.41 | 0.29 | 0.43 | 0.12 |
| 931 | I368P | 368 | 1.4 | 0.72 | 0.91 | 1.01 | 0.29 |
| 932 | I368Y | 368 | 0.42 | 0.52 | 0.79 | 0.57 | 0.16 |
| 933 | H369A | 369 | 0.99 | 1.34 | 1.04 | 1.13 | 0.15 |
| 934 | H369E | 369 | 0.28 | 0.5 | 1.21 | 0.66 | 0.4 |
| 935 | H369G | 369 | 0.38 | 0.9 | 0.52 | 0.6 | 0.22 |
| 936 | H369V | 369 | 0.73 | 0.7 | 0.33 | 0.58 | 0.18 |
| 937 | H369I | 369 | 0.15 | 0.75 | 0.57 | 0.49 | 0.25 |
| 938 | Y370A | 370 | 0.71 | 0.99 | 0.53 | 0.74 | 0.19 |
| 939 | Y370N | 370 | 0.9 | 0.78 | 0.48 | 0.72 | 0.18 |
| 940 | Y370G | 370 | 0.78 | 0.39 | 0.81 | 0.66 | 0.19 |
| 941 | Y370R | 370 | 0.54 | 0.5 | 0.55 | 0.53 | 0.02 |
| 942 | Y370P | 370 | 0.47 | 0.49 | 0.58 | 0.51 | 0.05 |
| 943 | N371C | 371 | 1.1 | 1.2 | 0.76 | 1.02 | 0.19 |
| 944 | N371G | 371 | 0.61 | 0.77 | 0.07 | 0.49 | 0.3 |
| 945 | N372F | 372 | 1.16 | 0.83 | 0.85 | 0.94 | 0.15 |
| 946 | N372A | 372 | 0.52 | 0.72 | 0.47 | 0.57 | 0.11 |
| 947 | N372W | 372 | 0.52 | 0.62 | 0.19 | 0.44 | 0.18 |
| 948 | I373D | 373 | 0.6 | 0.8 | 0.39 | 0.59 | 0.17 |
| 949 | L374H | 374 | 0.89 | 0.68 | 1.1 | 0.89 | 0.17 |
| 950 | L374Y | 374 | 1.17 | 0.83 | −0.03 | 0.66 | 0.51 |
| 951 | L374E | 374 | 0.61 | 0.65 | 0.37 | 0.55 | 0.12 |
| 952 | L374N | 374 | 0.55 | 0.24 | 0.53 | 0.44 | 0.14 |
| 953 | P3751 | 375 | 0.45 | 0.58 | 0.45 | 0.49 | 0.06 |
| 954 | P375Y | 375 | 0.46 | 0.48 | 0.48 | 0.47 | 0.01 |
| 955 | G376Q | 376 | 0.63 | 1.05 | 1.12 | 0.93 | 0.22 |
| 956 | N377V | 377 | 0.94 | 0.89 | 0.45 | 0.76 | 0.22 |
| 957 | N377L | 377 | 0.55 | 0.42 | 0.46 | 0.48 | 0.05 |
| 958 | N377P | 377 | 0.81 | 0.28 | 0.15 | 0.42 | 0.28 |
| 959 | G378N | 378 | 0.41 | 0.9 | 0.49 | 0.6 | 0.21 |
| 960 | G378W | 378 | 0.4 | 0.45 | 0.59 | 0.48 | 0.08 |
| 961 | K379F | 379 | 0.65 | 0.75 | 0.59 | 0.66 | 0.07 |
| 962 | K379A | 379 | 0.52 | 0.53 | 0.48 | 0.51 | 0.02 |
| 963 | K379R | 379 | 0.17 | 0.65 | 0.66 | 0.49 | 0.23 |
| 964 | K379G | 379 | 0.58 | 0.53 | 0.21 | 0.44 | 0.16 |
| 965 | K381L | 381 | 0.56 | 0.63 | 0.51 | 0.57 | 0.05 |
| 966 | K381W | 381 | 0.57 | 0.82 | 0.23 | 0.54 | 0.24 |
| 967 | K381P | 381 | 0.45 | 0.24 | 0.56 | 0.42 | 0.13 |
| 968 | D383M | 383 | 0.61 | 0.56 | 0.5 | 0.56 | 0.05 |
| 969 | D383P | 383 | 0.5 | 0.51 | 0.33 | 0.45 | 0.08 |
| 970 | K384D | 384 | 0.15 | 0.86 | 0.78 | 0.59 | 0.32 |
| 971 | K384P | 384 | 0.58 | 0.41 | 0.56 | 0.52 | 0.08 |
| 972 | K384G | 384 | 0.62 | 0.61 | 0.25 | 0.49 | 0.17 |
| 973 | V385C | 385 | 0.41 | 0.61 | 0.5 | 0.51 | 0.08 |
| 974 | V385Y | 385 | 0.53 | 0.53 | 0.44 | 0.5 | 0.04 |
| 975 | K386F | 386 | 0.55 | 0.47 | 0.28 | 0.43 | 0.11 |
| 976 | A388I | 388 | 0.61 | 1.06 | 0.91 | 0.86 | 0.19 |
| 977 | A388N | 388 | 0.64 | 0.48 | 1.05 | 0.72 | 0.24 |
| 978 | A388H | 388 | 0.31 | 0.49 | 0.54 | 0.45 | 0.1 |
| 979 | A388Y | 388 | 0.57 | 0.65 | 0.08 | 0.43 | 0.25 |
| 980 | V389E | 389 | 0.82 | 0.22 | 0.41 | 0.48 | 0.25 |
| 981 | K390C | 390 | 0.19 | 0.6 | 0.54 | 0.44 | 0.18 |
| 982 | N391W | 391 | 0.7 | 0.71 | 0.93 | 0.78 | 0.11 |
| 983 | N391Y | 391 | 0.63 | 0.7 | 0.17 | 0.5 | 0.23 |
| 984 | L393D | 393 | 0.69 | 0.44 | 0.71 | 0.61 | 0.12 |
| 985 | L393Y | 393 | 0.41 | 0.54 | 0.5 | 0.48 | 0.05 |
| 986 | Q394C | 394 | 1.99 | 2.4 | 2.22 | 2.2 | 0.17 |
| 987 | Q394M | 394 | 0.79 | 0.78 | 0.8 | 0.79 | 0.01 |
| 988 | Q394G | 394 | 1.06 | 0.48 | 0.75 | 0.76 | 0.23 |
| 989 | Q394W | 394 | 0.8 | 0.29 | 0.96 | 0.68 | 0.29 |
| 990 | Q394S | 394 | 0.56 | 0.76 | 0.63 | 0.65 | 0.08 |
| 991 | Q394A | 394 | 0.59 | 0.68 | 0.61 | 0.63 | 0.04 |
| 992 | Q394F | 394 | 0.35 | 0.72 | 0.8 | 0.62 | 0.19 |
| 993 | Q394V | 394 | 0.58 | 0.52 | 0.7 | 0.6 | 0.07 |
| 994 | Q394T | 394 | 0.4 | 0.46 | 0.73 | 0.53 | 0.14 |
| 995 | Q394I | 394 | 0.52 | 0.32 | 0.41 | 0.42 | 0.08 |
| 996 | K395V | 395 | 0.41 | 0.57 | 0.6 | 0.53 | 0.08 |
| 997 | K395I | 395 | 0.3 | 0.52 | 0.62 | 0.48 | 0.13 |
| 998 | K395F | 395 | 0.5 | 0.44 | 0.33 | 0.42 | 0.07 |
| 999 | I397Q | 397 | 1.28 | 0.91 | 0.63 | 0.94 | 0.26 |
| 1000 | I397C | 397 | 0.6 | 0.58 | 0.55 | 0.58 | 0.02 |
| 1001 | T398D | 398 | 0.82 | 0.56 | 0.68 | 0.68 | 0.11 |
| 1002 | T398F | 398 | 0.35 | 0.68 | 0.67 | 0.57 | 0.15 |
| 1003 | E399M | 399 | 0.76 | 0.91 | 0.38 | 0.68 | 0.22 |
| 1004 | I400E | 400 | 1.1 | 0.21 | −0.06 | 0.42 | 0.5 |
| 1005 | E402H | 402 | 0.86 | 0.12 | 0.49 | 0.49 | 0.3 |
| 1006 | S405M | 405 | 0.99 | 0.63 | 1.01 | 0.87 | 0.17 |
| 1007 | S405K | 405 | 0.46 | 0.64 | 0.48 | 0.53 | 0.08 |
| 1008 | S405R | 405 | 0.34 | 0.69 | 0.38 | 0.47 | 0.16 |
| 1009 | N406A | 406 | 0.53 | 0.61 | 0.63 | 0.59 | 0.04 |
| 1010 | N406V | 406 | 0.34 | 0.61 | 0.34 | 0.43 | 0.13 |
| 1011 | Y407R | 407 | 0.81 | 1.3 | 1.23 | 1.12 | 0.22 |
| 1012 | Y407P | 407 | 1.1 | 0.49 | 0.44 | 0.68 | 0.3 |
| 1013 | Y407I | 407 | 0.56 | 0.49 | 0.62 | 0.56 | 0.05 |
| 1014 | K408I | 408 | 0.91 | 0.72 | 0.92 | 0.85 | 0.09 |
| 1015 | K408C | 408 | 0.88 | 0.45 | 0.29 | 0.54 | 0.25 |
| 1016 | K408D | 408 | 0.24 | 0.65 | 0.49 | 0.46 | 0.17 |
| 1017 | C410F | 410 | 0.33 | 0.57 | 0.36 | 0.42 | 0.11 |
| 1018 | S411N | 411 | 1.31 | 1.39 | 1.03 | 1.24 | 0.15 |
| 1019 | S411V | 411 | 0.7 | 0.46 | 0.76 | 0.64 | 0.13 |
| 1020 | D413W | 413 | 0.78 | 0.32 | 0.68 | 0.59 | 0.2 |
| 1021 | D413T | 413 | 0.73 | 0.67 | 0.29 | 0.56 | 0.19 |
| 1022 | D413R | 413 | 0.68 | 0.29 | 0.52 | 0.5 | 0.16 |
| 1023 | N414A | 414 | 1.39 | 0.21 | 1.19 | 0.93 | 0.51 |
| 1024 | N414D | 414 | 0.59 | 0.83 | 0.63 | 0.68 | 0.11 |
| 1025 | N414S | 414 | 0.4 | 1.09 | 0.34 | 0.61 | 0.34 |
| 1026 | N414L | 414 | 0.23 | 1.03 | 0.24 | 0.5 | 0.38 |
| 1027 | N414H | 414 | 0.83 | 0.4 | 0.12 | 0.45 | 0.29 |
| 1028 | I415E | 415 | 0.43 | 0.9 | −0.07 | 0.42 | 0.4 |
| 1029 | I415C | 415 | −0.27 | 0.5 | 1.03 | 0.42 | 0.53 |
| 1030 | K416P | 416 | 0.71 | 0.86 | 0.5 | 0.69 | 0.15 |
| 1031 | K416V | 416 | 0.6 | 0.56 | 0.34 | 0.5 | 0.11 |
| 1032 | K416W | 416 | 0.74 | 0.5 | 0.22 | 0.49 | 0.21 |
| 1033 | A417M | 417 | 1.18 | 1.31 | 1.28 | 1.25 | 0.06 |
| 1034 | A417C | 417 | 0.89 | 0.43 | 1.52 | 0.95 | 0.44 |
| 1035 | E418W | 418 | 0.45 | 0.84 | 0.38 | 0.56 | 0.2 |
| 1036 | T419G | 419 | 0.83 | 0.21 | 1.72 | 0.92 | 0.62 |
| 1037 | T419H | 419 | 0.83 | 0.9 | 1.03 | 0.92 | 0.08 |
| 1038 | T419Y | 419 | 0.83 | 1.31 | −0.76 | 0.46 | 0.88 |
| 1039 | Y420V | 420 | 0.83 | 1.12 | 1.32 | 1.09 | 0.2 |
| 1040 | Y420R | 420 | 0.39 | 0.82 | 1.16 | 0.79 | 0.32 |
| 1041 | Y420K | 420 | 0.62 | 0.48 | 0.99 | 0.7 | 0.22 |
| 1042 | Y420Q | 420 | 0.98 | 0.2 | 0.78 | 0.65 | 0.33 |
| 1043 | I421F | 421 | 1.23 | 2.15 | 1.72 | 1.7 | 0.38 |
| 1044 | H422M | 422 | 0.83 | 1.12 | 0.49 | 0.81 | 0.26 |
| 1045 | H422C | 422 | 0.13 | 1.59 | 0.33 | 0.68 | 0.64 |
| 1046 | H422A | 422 | 0.42 | 0.28 | 0.97 | 0.56 | 0.3 |
| 1047 | H422F | 422 | 0.64 | 0.49 | 0.44 | 0.52 | 0.09 |
| 1048 | E423R | 423 | 0.82 | 1.12 | 1.8 | 1.25 | 0.41 |
| 1049 | E423T | 423 | 0.54 | 1.3 | −0.07 | 0.59 | 0.56 |
| 1050 | E423S | 423 | 0.82 | 0.2 | 0.62 | 0.55 | 0.26 |
| 1051 | E423H | 423 | −0.09 | 0.79 | 0.88 | 0.53 | 0.44 |
| 1052 | E423A | 423 | 0.98 | 0.49 | −0.07 | 0.47 | 0.43 |
| 1053 | E423Y | 423 | 0.13 | 1.01 | 0.15 | 0.43 | 0.41 |
| 1054 | S425E | 425 | 0.72 | 0.79 | 0.52 | 0.67 | 0.12 |
| 1055 | S425K | 425 | 0.25 | 1.17 | 0.41 | 0.61 | 0.4 |
| 1056 | H426I | 426 | 2 | 2.15 | 1.94 | 2.03 | 0.09 |
| 1057 | H426G | 426 | 1.31 | 0.89 | 0.74 | 0.98 | 0.24 |
| 1058 | I427H | 427 | 0.64 | 0.81 | 0.66 | 0.7 | 0.07 |
| 1059 | L428T | 428 | 0.13 | 0.89 | 0.62 | 0.55 | 0.32 |
| 1060 | L428Y | 428 | 0.38 | 0.45 | 0.51 | 0.45 | 0.05 |
| 1061 | N429P | 429 | 1.14 | 0.42 | 1.18 | 0.91 | 0.35 |
| 1062 | N429A | 429 | 0.35 | 1.45 | 0.33 | 0.71 | 0.52 |
| 1063 | F431R | 431 | 1.04 | 1.45 | 0.33 | 0.94 | 0.46 |
| 1064 | F431A | 431 | 0.41 | 0.71 | 0.91 | 0.68 | 0.2 |
| 1065 | E432L | 432 | 1.04 | 1.01 | 0.84 | 0.96 | 0.09 |
| 1066 | E432R | 432 | 0.82 | 0.42 | 0.74 | 0.66 | 0.17 |
| 1067 | E432C | 432 | 0.64 | 0.71 | 0.21 | 0.52 | 0.22 |
| 1068 | E432T | 432 | 1.11 | 0.2 | 0.21 | 0.51 | 0.42 |
| 1069 | Q434F | 434 | 1.22 | 1.81 | 1.87 | 1.63 | 0.29 |
| 1070 | Q434W | 434 | 1.73 | 0.89 | 2.01 | 1.54 | 0.47 |
| 1071 | Q434S | 434 | 1.04 | 0.89 | 0.84 | 0.93 | 0.08 |
| 1072 | Q434I | 434 | 0.82 | 0.2 | 1.72 | 0.91 | 0.62 |
| 1073 | Q434L | 434 | 0.89 | 0.74 | 0.55 | 0.72 | 0.14 |
| 1074 | Q434P | 434 | −0.16 | 0.76 | 1.03 | 0.54 | 0.51 |
| 1075 | Q434T | 434 | 0.48 | 0.65 | 0.42 | 0.52 | 0.1 |
| 1076 | E435A | 435 | 0.97 | 0.89 | 0.62 | 0.83 | 0.15 |
| 1077 | E435L | 435 | 0.99 | 0.8 | 0.09 | 0.63 | 0.38 |
| 1078 | E435Y | 435 | 0.53 | 0.97 | 0.21 | 0.57 | 0.31 |
| 1079 | L436G | 436 | 2.18 | 2.4 | 2.21 | 2.26 | 0.1 |
| 1080 | L436E | 436 | 1.22 | 1.4 | 1.6 | 1.41 | 0.15 |
| 1081 | L436T | 436 | 0.82 | 0.99 | 0.8 | 0.87 | 0.08 |
| 1082 | L436D | 436 | 0.64 | 0.89 | 1.08 | 0.87 | 0.18 |
| 1083 | L436A | 436 | 1.35 | 0.2 | 1.03 | 0.86 | 0.48 |
| 1084 | L436S | 436 | 0.88 | 0.56 | 1.03 | 0.82 | 0.2 |
| 1085 | L436W | 436 | 0.82 | 0.47 | 0.96 | 0.75 | 0.21 |
| 1086 | L436K | 436 | 0.68 | 1.11 | 0.33 | 0.71 | 0.32 |
| 1087 | L436P | 436 | 1.29 | 0.38 | 0.4 | 0.69 | 0.42 |
| 1088 | L436R | 436 | 0.64 | 0.6 | 0.49 | 0.58 | 0.06 |
| 1089 | K437P | 437 | 0.64 | 1.3 | 1.03 | 0.99 | 0.27 |
| 1090 | K437C | 437 | 0.82 | 1.11 | 0.84 | 0.93 | 0.13 |
| 1091 | K437H | 437 | 1.3 | 0.2 | 0.74 | 0.75 | 0.45 |
| 1092 | K437W | 437 | −0.28 | 1.04 | 0.77 | 0.51 | 0.57 |
| 1093 | Y438R | 438 | 1.85 | 2.08 | 2.07 | 2 | 0.11 |
| 1094 | Y438A | 438 | 0.89 | 0.98 | 1.13 | 1 | 0.1 |
| 1095 | Y438W | 438 | 1.01 | 1.06 | 0.92 | 1 | 0.06 |
| 1096 | Y438P | 438 | 0.95 | 0.55 | 0.63 | 0.71 | 0.17 |
| 1097 | Y438K | 438 | 0.56 | 0.77 | 0.72 | 0.68 | 0.09 |
| 1098 | Y438I | 438 | 0.76 | 0.71 | 0.51 | 0.66 | 0.11 |
| 1099 | Y438G | 438 | 0.55 | 0.25 | 0.58 | 0.46 | 0.15 |
| 1100 | Y438L | 438 | 0.4 | 0.52 | 0.43 | 0.45 | 0.05 |
| 1101 | Y438E | 438 | 0.35 | 0.51 | 0.46 | 0.44 | 0.07 |
| 1102 | N439G | 439 | 2.07 | 1.81 | 1.72 | 1.86 | 0.15 |
| 1103 | N439P | 439 | 1.3 | 1.45 | 1.31 | 1.35 | 0.07 |
| 1104 | N439H | 439 | 1.38 | 0.89 | 0.84 | 1.04 | 0.24 |
| 1105 | N439A | 439 | 0.91 | −0.03 | 0.8 | 0.56 | 0.42 |
| 1106 | N439S | 439 | 0.65 | 0.2 | 0.39 | 0.42 | 0.19 |
| 1107 | P440K | 440 | 2.4 | 2.48 | 2.5 | 2.46 | 0.04 |
| 1108 | P440R | 440 | 1.82 | 1.89 | 1.94 | 1.89 | 0.05 |
| 1109 | P440N | 440 | 1.51 | 1.84 | 1.64 | 1.66 | 0.14 |
| 1110 | P440D | 440 | 1.42 | 2.2 | 1.22 | 1.61 | 0.42 |
| 1111 | P440T | 440 | 1.38 | 1.54 | 1.47 | 1.46 | 0.06 |
| 1112 | P440Q | 440 | 1.24 | 1.5 | 1.52 | 1.42 | 0.13 |
| 1113 | P440E | 440 | 1.26 | 1.42 | 1.46 | 1.38 | 0.08 |
| 1114 | P440G | 440 | 1.27 | 1.48 | 1.11 | 1.29 | 0.15 |
| 1115 | P440L | 440 | 0.9 | 1.28 | 1.21 | 1.13 | 0.16 |
| 1116 | P440S | 440 | 0.67 | 0.89 | 0.99 | 0.85 | 0.13 |
| 1117 | P440A | 440 | 0.77 | 0.52 | 0.68 | 0.66 | 0.1 |
| 1118 | P440M | 440 | 0.68 | 0.59 | 0.57 | 0.61 | 0.04 |
| 1119 | E441H | 441 | 1.42 | 1.81 | 1.39 | 1.54 | 0.19 |
| 1120 | E441R | 441 | 1.22 | 1.45 | 1.54 | 1.4 | 0.13 |
| 1121 | E441K | 441 | 1.12 | 1.03 | 1.31 | 1.15 | 0.12 |
| 1122 | E441N | 441 | 0.53 | 0.6 | 1.02 | 0.72 | 0.22 |
| 1123 | E441F | 441 | 0.63 | 0.71 | 0.62 | 0.65 | 0.04 |
| 1124 | E441G | 441 | 0.62 | 0.36 | 0.46 | 0.48 | 0.11 |
| 1125 | I442P | 442 | 1.33 | 1.93 | 1.47 | 1.57 | 0.26 |
| 1126 | I442Y | 442 | 0.81 | 0.84 | 1.23 | 0.96 | 0.19 |
| 1127 | I442A | 442 | 0.91 | 0.53 | 1.26 | 0.9 | 0.3 |
| 1128 | I442G | 442 | 1.14 | 0.08 | 0.03 | 0.42 | 0.51 |
| 1129 | H443E | 443 | 1.01 | 1.37 | 1.4 | 1.26 | 0.17 |
| 1130 | H443F | 443 | 1.51 | 0.6 | 1.32 | 1.14 | 0.39 |
| 1131 | H443W | 443 | 0.3 | 1.07 | 0.52 | 0.63 | 0.33 |
| 1132 | H443A | 443 | 0.41 | 1.18 | 0.22 | 0.6 | 0.42 |
| 1133 | L444W | 444 | 3.78 | 3.57 | 3.3 | 3.55 | 0.2 |
| 1134 | L444A | 444 | 2.07 | 2.42 | 2.4 | 2.29 | 0.16 |
| 1135 | L444E | 444 | 1.46 | 2.05 | 1.94 | 1.82 | 0.25 |
| 1136 | L444Y | 444 | 1.66 | 1.67 | 2.13 | 1.82 | 0.22 |
| 1137 | L444K | 444 | 1.73 | 1.81 | 1.63 | 1.73 | 0.07 |
| 1138 | L444N | 444 | 1.51 | 1.67 | 1.83 | 1.67 | 0.13 |
| 1139 | L444T | 444 | 1.45 | 1.46 | 1.57 | 1.49 | 0.05 |
| 1140 | L444C | 444 | 1.46 | 1.18 | 1.08 | 1.24 | 0.16 |
| 1141 | L444D | 444 | 0.53 | 1.5 | 1.6 | 1.21 | 0.49 |
| 1142 | L444H | 444 | 1.06 | 1.09 | 1.4 | 1.18 | 0.15 |
| 1143 | L444G | 444 | 1.04 | 0.71 | 1.27 | 1.01 | 0.23 |
| 1144 | L444I | 444 | 0.06 | 0.63 | 0.83 | 0.51 | 0.33 |
| 1145 | V445K | 445 | 2.65 | 2.76 | 2.89 | 2.77 | 0.1 |
| 1146 | V445Q | 445 | 2.02 | 1.05 | 1.82 | 1.63 | 0.42 |
| 1147 | V445P | 445 | 1.4 | 1.81 | 1.52 | 1.58 | 0.17 |
| 1148 | V445E | 445 | 1.4 | 1.33 | 1.35 | 1.36 | 0.03 |
| 1149 | V445R | 445 | 1.12 | 1.22 | 0.99 | 1.11 | 0.1 |
| 1150 | V445C | 445 | 0.57 | 0.89 | 0.29 | 0.58 | 0.25 |
| 1151 | V445W | 445 | 0.55 | 0.47 | 0.5 | 0.51 | 0.03 |
| 1152 | E446W | 446 | 0.82 | 1.3 | 1.88 | 1.33 | 0.43 |
| 1153 | E446P | 446 | 1.3 | 1.01 | 1.38 | 1.23 | 0.16 |
| 1154 | E446T | 446 | 0.53 | 0.61 | 0.34 | 0.49 | 0.11 |
| 1155 | S447L | 447 | 0.82 | 0.8 | 0.9 | 0.84 | 0.04 |
| 1156 | S447P | 447 | 0.8 | 0.9 | 0.75 | 0.82 | 0.06 |
| 1157 | S447W | 447 | 0.71 | 0.96 | 0.6 | 0.76 | 0.15 |
| 1158 | S447F | 447 | 0.4 | 0.66 | 0.63 | 0.56 | 0.11 |
| 1159 | S447Q | 447 | 0.67 | 0.54 | 0.4 | 0.54 | 0.11 |
| 1160 | S447D | 447 | 0.68 | 1.02 | −0.2 | 0.5 | 0.51 |
| 1161 | S447I | 447 | 0.51 | 0.36 | 0.46 | 0.45 | 0.06 |
| 1162 | S447Y | 447 | 0.18 | 0.75 | 0.38 | 0.44 | 0.23 |
| 1163 | E448W | 448 | 1.22 | 1.38 | 1.25 | 1.29 | 0.07 |
| 1164 | E448I | 448 | 1.3 | 1.12 | 1.07 | 1.16 | 0.1 |
| 1165 | E448Y | 448 | 0.27 | 0.81 | 1.13 | 0.74 | 0.36 |
| 1166 | E448H | 448 | 0.78 | 0.73 | 0.53 | 0.68 | 0.11 |
| 1167 | E448A | 448 | 0.4 | 0.2 | 0.64 | 0.42 | 0.18 |
| 1168 | L449D | 449 | 0.51 | 0.52 | 0.22 | 0.42 | 0.14 |
| 1169 | K450G | 450 | 1.38 | 0.54 | 0.96 | 0.96 | 0.34 |
| 1170 | K450S | 450 | 0.43 | 0.64 | 0.39 | 0.49 | 0.11 |
| 1171 | K450C | 450 | 0.26 | 0.53 | 0.6 | 0.46 | 0.15 |
| 1172 | K450V | 450 | 0.71 | 0.39 | 0.2 | 0.43 | 0.21 |
| 1173 | A451C | 451 | 0.82 | 0.82 | 0.52 | 0.72 | 0.14 |
| 1174 | A451M | 451 | 0.68 | 0.28 | 0.82 | 0.59 | 0.23 |
| 1175 | A451I | 451 | 0.26 | 0.55 | 0.68 | 0.5 | 0.18 |
| 1176 | S452P | 452 | 1.25 | 1.42 | 1.44 | 1.37 | 0.09 |
| 1177 | S452V | 452 | 0.53 | 0.73 | 0.41 | 0.56 | 0.13 |
| 1178 | S452G | 452 | 0.45 | 0.75 | 0.3 | 0.5 | 0.18 |
| 1179 | E453W | 453 | 1.35 | 1.25 | 1.43 | 1.34 | 0.07 |
| 1180 | E453F | 453 | 0.4 | 0.47 | 0.43 | 0.43 | 0.03 |
| 1181 | L454Y | 454 | 0.65 | 0.59 | 0.54 | 0.6 | 0.05 |
| 1182 | L454S | 454 | 0.62 | 0.39 | 0.53 | 0.51 | 0.1 |
| 1183 | L454R | 454 | 0.61 | 0.57 | 0.26 | 0.48 | 0.15 |
| 1184 | N456P | 456 | 1.3 | 1.07 | 1.6 | 1.32 | 0.21 |
| 1185 | N456M | 456 | 1.1 | 1.51 | 1.09 | 1.24 | 0.19 |
| 1186 | N456Q | 456 | 0.12 | 0.5 | 1.04 | 0.55 | 0.38 |
| 1187 | N456R | 456 | −0.28 | 0.56 | 1.12 | 0.46 | 0.58 |
| 1188 | V457T | 457 | 0.59 | 0.8 | 0.89 | 0.76 | 0.13 |
| 1189 | V457Y | 457 | 1.22 | 0.72 | 0.23 | 0.72 | 0.41 |
| 1190 | V457E | 457 | 0.82 | 0.5 | −0.06 | 0.42 | 0.36 |
| 1191 | V460N | 460 | 1.14 | 0.61 | 1.27 | 1.01 | 0.28 |
| 1192 | V460I | 460 | 1.29 | 0.68 | 0.64 | 0.87 | 0.3 |
| 1193 | V460K | 460 | 0.82 | 0.97 | 0.64 | 0.81 | 0.14 |
| 1194 | V460E | 460 | 0.67 | 1.05 | 0.57 | 0.76 | 0.21 |
| 1195 | V460P | 460 | 0.63 | 0.9 | 0.45 | 0.66 | 0.18 |
| 1196 | V460H | 460 | 0.41 | 0.9 | −0.06 | 0.42 | 0.39 |
| 1197 | I461C | 461 | 0.75 | 0.7 | 0.35 | 0.6 | 0.18 |
| 1198 | I461Y | 461 | 0.43 | 0.5 | 0.44 | 0.46 | 0.03 |
| 1199 | N463A | 463 | 0.4 | 0.34 | 0.59 | 0.44 | 0.11 |
| 1200 | F465R | 465 | 1.4 | 1.37 | 1.35 | 1.38 | 0.02 |
| 1201 | F465Q | 465 | 0.79 | 1.03 | 1.17 | 1 | 0.16 |
| 1202 | F465K | 465 | 0.83 | 1.05 | 1.06 | 0.98 | 0.1 |
| 1203 | F465E | 465 | 1.13 | 0.85 | 0.76 | 0.91 | 0.16 |
| 1204 | F465T | 465 | 0.89 | 0.73 | 0.81 | 0.81 | 0.07 |
| 1205 | F465A | 465 | 0.7 | 0.96 | 0.71 | 0.79 | 0.12 |
| 1206 | F465V | 465 | 0.73 | 0.94 | 0.51 | 0.73 | 0.18 |
| 1207 | F465N | 465 | 0.62 | 0.7 | 0.7 | 0.67 | 0.04 |
| 1208 | F465G | 465 | 0.55 | 0.44 | 0.62 | 0.54 | 0.07 |
| 1209 | F465S | 465 | 0.28 | 0.42 | 0.57 | 0.43 | 0.12 |
| 1210 | H466K | 466 | 0.65 | 0.87 | 0.58 | 0.7 | 0.13 |
| 1211 | H466C | 466 | 0.43 | 0.79 | 0.25 | 0.49 | 0.22 |
| 1212 | S469K | 469 | 0.98 | 1.19 | 1.14 | 1.1 | 0.09 |
| 1213 | S469P | 469 | 0.7 | 0.4 | 0.82 | 0.64 | 0.18 |
| 1214 | S469L | 469 | 0.6 | 0.57 | 0.66 | 0.61 | 0.03 |
| 1215 | S469M | 469 | 0.52 | 0.67 | 0.44 | 0.54 | 0.09 |
| 1216 | S469V | 469 | 0.44 | 0.45 | 0.6 | 0.5 | 0.07 |
| 1217 | S469R | 469 | 0.39 | 0.5 | 0.42 | 0.44 | 0.05 |
| 1218 | V470K | 470 | 1.04 | 1.06 | 1.11 | 1.07 | 0.03 |
| 1219 | V470N | 470 | 0.65 | 0.44 | 0.67 | 0.59 | 0.11 |
| 1220 | V470Y | 470 | 0.65 | 0.48 | 0.59 | 0.57 | 0.07 |
| 1221 | M472G | 472 | 0.35 | 0.88 | 0.57 | 0.6 | 0.22 |
| 1222 | T473R | 473 | 0.18 | 0.89 | 0.46 | 0.51 | 0.3 |
| 1223 | T473G | 473 | −0.23 | 1.62 | 0.05 | 0.48 | 0.82 |
| 1224 | T473F | 473 | 0.41 | 0.21 | 0.65 | 0.42 | 0.18 |
| 1225 | E474P | 474 | 0.78 | 1.04 | 0.87 | 0.9 | 0.11 |
| 1226 | L476R | 476 | 1.05 | 1.29 | 1.13 | 1.16 | 0.1 |
| 1227 | L476K | 476 | 0.61 | 0.49 | 0.75 | 0.62 | 0.11 |
| 1228 | L476H | 476 | 0.46 | 0.74 | 0.49 | 0.56 | 0.13 |
| 1229 | L476T | 476 | 0.39 | 0.58 | 0.49 | 0.48 | 0.08 |
| 1230 | L476G | 476 | 0.43 | 0.56 | 0.42 | 0.47 | 0.06 |
| 1231 | L476N | 476 | 0.47 | 0.5 | 0.36 | 0.44 | 0.06 |
| 1232 | V477Q | 477 | 1.14 | 1.43 | 1.34 | 1.3 | 0.12 |
| 1233 | V477T | 477 | 1.12 | 1.04 | 1.54 | 1.23 | 0.22 |
| 1234 | V477W | 477 | 1.3 | 1.87 | −0.73 | 0.81 | 1.12 |
| 1235 | V477E | 477 | 1.07 | 0.29 | 0.67 | 0.68 | 0.32 |
| 1236 | V477D | 477 | 0.62 | 0.75 | 0.15 | 0.51 | 0.26 |
| 1237 | V477M | 477 | 0.53 | 0.42 | 0.44 | 0.46 | 0.05 |
| 1238 | K479A | 479 | 0.13 | 1.2 | 1.16 | 0.83 | 0.5 |
| 1239 | K479H | 479 | 1.04 | −0.48 | 1.06 | 0.54 | 0.72 |
| 1240 | K479D | 479 | 0.44 | 0.59 | 0.45 | 0.49 | 0.07 |
| 1241 | D480Q | 480 | 0.69 | 0.33 | 0.88 | 0.63 | 0.23 |
| 1242 | D480P | 480 | 0.34 | 0.29 | 0.65 | 0.43 | 0.16 |
| 1243 | N481A | 481 | 2.07 | 0.91 | 1.06 | 1.35 | 0.52 |
| 1244 | N481D | 481 | 0.46 | 0.91 | 0.3 | 0.56 | 0.26 |
| 1245 | N482A | 482 | 1.79 | 1.66 | 2.07 | 1.84 | 0.17 |
| 1246 | N482H | 482 | 1.04 | 0.22 | 1.47 | 0.91 | 0.52 |
| 1247 | N482Q | 482 | 0.69 | 0.44 | 0.97 | 0.7 | 0.22 |
| 1248 | N482D | 482 | 0.13 | 0.91 | 0.25 | 0.43 | 0.34 |
| 1249 | N482S | 482 | 0.38 | 0.47 | 0.41 | 0.42 | 0.04 |
| 1250 | F483W | 483 | 0.64 | 0.77 | 0.35 | 0.58 | 0.18 |
| 1251 | F483A | 483 | 0.39 | 0.4 | 0.8 | 0.53 | 0.19 |
| 1252 | Y484G | 484 | 1.23 | 0.22 | 1.35 | 0.93 | 0.51 |
| 1253 | Y484V | 484 | 0.69 | 0.44 | 0.53 | 0.55 | 0.1 |
| 1254 | Y484R | 484 | 0.82 | 0.34 | 0.45 | 0.54 | 0.21 |
| 1255 | A485Q | 485 | 0.62 | 0.45 | 1.15 | 0.74 | 0.3 |
| 1256 | A485K | 485 | 0.63 | 1.08 | 0.37 | 0.69 | 0.29 |
| 1257 | A485R | 485 | 0.32 | 0.76 | 0.99 | 0.69 | 0.28 |
| 1258 | A485L | 485 | 0.73 | 0.67 | 0.45 | 0.62 | 0.12 |
| 1259 | A485H | 485 | 0.38 | 0.84 | 0.42 | 0.55 | 0.21 |
| 1260 | A485S | 485 | 0.7 | 0.4 | 0.46 | 0.52 | 0.13 |
| 1261 | E486L | 486 | 1.89 | 1.95 | 1.19 | 1.68 | 0.34 |
| 1262 | E486R | 486 | 1.23 | 1.61 | 1.22 | 1.35 | 0.18 |
| 1263 | E486S | 486 | 0.82 | 1.76 | 1.44 | 1.34 | 0.39 |
| 1264 | E486Y | 486 | 1.52 | 1.32 | 1.15 | 1.33 | 0.15 |
| 1265 | E486F | 486 | 0.69 | 1.14 | 0.53 | 0.79 | 0.26 |
| 1266 | E486A | 486 | 1.36 | 0.41 | 0.56 | 0.77 | 0.42 |
| 1267 | E486G | 486 | 0.54 | 0.52 | 0.19 | 0.42 | 0.16 |
| 1268 | E488Q | 488 | 0.42 | 1.43 | 0.82 | 0.89 | 0.41 |
| 1269 | E488T | 488 | 0.54 | 0.92 | 0.78 | 0.75 | 0.16 |
| 1270 | E489H | 489 | 2.08 | 1.14 | 1.23 | 1.48 | 0.42 |
| 1271 | E489C | 489 | 0.72 | 1.18 | 1.2 | 1.03 | 0.22 |
| 1272 | E489T | 489 | 0.86 | 1.06 | 0.53 | 0.82 | 0.22 |
| 1273 | E489M | 489 | 0.36 | 0.63 | 0.86 | 0.61 | 0.2 |
| 1274 | E489S | 489 | 0.33 | 0.64 | 0.53 | 0.5 | 0.13 |
| 1275 | E489W | 489 | 0.38 | 0.23 | 0.7 | 0.43 | 0.2 |
| 1276 | I490A | 490 | 0.47 | 0.56 | 1.07 | 0.7 | 0.27 |
| 1277 | I490E | 490 | 0.37 | 0.65 | 0.54 | 0.52 | 0.12 |
| 1278 | Y491E | 491 | 1.23 | 0.92 | 1.23 | 1.13 | 0.15 |
| 1279 | Y491Q | 491 | 0.83 | 0.22 | 0.89 | 0.65 | 0.3 |
| 1280 | D492I | 492 | 1.67 | 1.69 | 1.52 | 1.63 | 0.08 |
| 1281 | D492L | 492 | 0.4 | 0.76 | 0.56 | 0.57 | 0.15 |
| 1282 | D492K | 492 | 0.29 | 0.04 | 1.36 | 0.56 | 0.57 |
| 1283 | E493C | 493 | 0.65 | 0.59 | 0.08 | 0.44 | 0.25 |
| 1284 | E493R | 493 | 0.43 | 0.35 | 0.51 | 0.43 | 0.07 |
| 1285 | Y495V | 495 | 0.49 | 0.78 | 0.77 | 0.68 | 0.14 |
| 1286 | P496W | 496 | 0.14 | 1.62 | 2.28 | 1.35 | 0.9 |
| 1287 | P496E | 496 | 1.23 | 0.92 | 1.23 | 1.13 | 0.15 |
| 1288 | P496C | 496 | 0.98 | 1.08 | 0.96 | 1.01 | 0.05 |
| 1289 | P496V | 496 | 0.98 | 0.74 | 1.28 | 1 | 0.22 |
| 1290 | P496L | 496 | 0.7 | 0.96 | 0.65 | 0.77 | 0.14 |
| 1291 | P496K | 496 | 0.95 | 0.45 | 0.9 | 0.77 | 0.22 |
| 1292 | P496S | 496 | 0.57 | 0.34 | 0.4 | 0.43 | 0.1 |
| 1293 | P496I | 496 | 0.83 | −0.46 | 0.9 | 0.42 | 0.63 |
| 1294 | V497W | 497 | 0.17 | 0.88 | 1.05 | 0.7 | 0.38 |
| 1295 | I498R | 498 | 1.21 | 1.15 | 0.91 | 1.09 | 0.13 |
| 1296 | I498K | 498 | 0.86 | 0.75 | 0.64 | 0.75 | 0.09 |
| 1297 | I498P | 498 | 0.59 | 0.63 | 0.71 | 0.65 | 0.05 |
| 1298 | I498G | 498 | 0.28 | 0.66 | 0.63 | 0.52 | 0.17 |
| 1299 | S499M | 499 | 0.98 | 0.74 | 0.67 | 0.8 | 0.13 |
| 1300 | S499C | 499 | 1.23 | 1.04 | −0.31 | 0.65 | 0.68 |
| 1301 | S499G | 499 | 0.83 | 0.23 | 0.67 | 0.58 | 0.26 |
| 1302 | L500S | 500 | 0.27 | 0.95 | 0.17 | 0.47 | 0.34 |
| 1303 | L503N | 503 | 0.82 | 2.3 | 2.54 | 1.89 | 0.76 |
| 1304 | L503P | 503 | 1.23 | 1.14 | 0.99 | 1.12 | 0.1 |
| 1305 | L503H | 503 | 0.64 | 1.2 | 0.59 | 0.81 | 0.28 |
| 1306 | L503I | 503 | 1.31 | 0.45 | 0.67 | 0.81 | 0.37 |
| 1307 | L503G | 503 | 0.69 | 0.78 | 0.67 | 0.72 | 0.05 |
| 1308 | L503R | 503 | 0.31 | 0.69 | 0.94 | 0.65 | 0.26 |
| 1309 | L503D | 503 | 0.42 | 1.2 | 0.27 | 0.63 | 0.41 |
| 1310 | L503K | 503 | 0.31 | 0.69 | 0.86 | 0.62 | 0.23 |
| 1311 | L503E | 503 | 0.54 | 0.22 | 1.08 | 0.61 | 0.35 |
| 1312 | L503W | 503 | 0.42 | 1.07 | −0.02 | 0.49 | 0.45 |
| 1313 | V504A | 504 | 1.26 | 1.45 | 1.64 | 1.45 | 0.16 |
| 1314 | V504T | 504 | 0.96 | 1.09 | 1.21 | 1.08 | 0.1 |
| 1315 | V504G | 504 | 0.75 | 0.61 | 0.74 | 0.7 | 0.06 |
| 1316 | V504C | 504 | 0.21 | 0.67 | 0.55 | 0.48 | 0.19 |
| 1317 | Y507R | 507 | 2.44 | 2.56 | 2.77 | 2.59 | 0.13 |
| 1318 | Y507K | 507 | 2.45 | 2.47 | 2.36 | 2.43 | 0.05 |
| 1319 | Y507W | 507 | 1.96 | 2.04 | 2.26 | 2.09 | 0.13 |
| 1320 | Y507S | 507 | 1.92 | 1.99 | 2.05 | 1.99 | 0.05 |
| 1321 | Y507A | 507 | 1.79 | 1.86 | 1.78 | 1.81 | 0.04 |
| 1322 | Y507T | 507 | 1.5 | 1.73 | 1.79 | 1.67 | 0.13 |
| 1323 | Y507Q | 507 | 1.6 | 1.52 | 1.87 | 1.67 | 0.15 |
| 1324 | Y507C | 507 | 1.41 | 1.28 | 1.53 | 1.41 | 0.1 |
| 1325 | Y507V | 507 | 0.99 | 1.09 | 1.21 | 1.1 | 0.09 |
| 1326 | Y507E | 507 | 1.23 | 0.63 | 1.43 | 1.1 | 0.34 |
| 1327 | Y507G | 507 | 1.17 | 0.77 | 0.95 | 0.96 | 0.16 |
| 1328 | Y507L | 507 | 0.99 | 0.86 | 0.7 | 0.85 | 0.12 |
| 1329 | Y507I | 507 | 1 | 0.66 | 0.85 | 0.84 | 0.14 |
| 1330 | T509L | 509 | 0.62 | 1.01 | 1.1 | 0.91 | 0.21 |
| 1331 | T509V | 509 | 0.31 | 1.29 | 0.38 | 0.66 | 0.44 |
| 1332 | T509M | 509 | 1.01 | 0.81 | 0.07 | 0.63 | 0.4 |
| 1333 | Q510F | 510 | 2.46 | 2.65 | 2.77 | 2.63 | 0.13 |
| 1334 | Q510G | 510 | 2.19 | 2.39 | 2.52 | 2.37 | 0.14 |
| 1335 | Q510Y | 510 | 2.22 | 2.26 | 2.36 | 2.28 | 0.06 |
| 1336 | Q510S | 510 | 2.12 | 2.37 | 2.3 | 2.26 | 0.1 |
| 1337 | Q510C | 510 | 2.08 | 2.16 | 2.18 | 2.14 | 0.05 |
| 1338 | Q510V | 510 | 2.01 | 2.17 | 2.21 | 2.13 | 0.09 |
| 1339 | Q510W | 510 | 1.95 | 2.19 | 2.16 | 2.1 | 0.11 |
| 1340 | Q510N | 510 | 1.91 | 1.85 | 2.22 | 1.99 | 0.16 |
| 1341 | Q510A | 510 | 1.58 | 1.81 | 1.92 | 1.77 | 0.14 |
| 1342 | Q510D | 510 | 1.56 | 1.97 | 1.46 | 1.66 | 0.22 |
| 1343 | Q510I | 510 | 1.77 | 1.46 | 1.75 | 1.66 | 0.14 |
| 1344 | Q510H | 510 | 1.04 | 1.19 | 1.13 | 1.12 | 0.06 |
| 1345 | Q510K | 510 | 0.83 | 0.99 | 0.94 | 0.92 | 0.07 |
| 1346 | Q510M | 510 | 0.75 | 0.67 | 0.63 | 0.68 | 0.05 |
| 1347 | Q510E | 510 | 0.64 | 0.69 | 0.61 | 0.65 | 0.03 |
| 1348 | Q510P | 510 | 0.68 | 0.58 | 0.59 | 0.62 | 0.04 |
| 1349 | Q510T | 510 | 0.48 | 0.72 | 0.63 | 0.61 | 0.1 |
| 1350 | Q510R | 510 | 0.35 | 0.47 | 0.5 | 0.44 | 0.07 |
| 1351 | K511Y | 511 | 0.96 | 1.37 | 0.33 | 0.88 | 0.43 |
| 1352 | K511G | 511 | 1.45 | 0.85 | 0.29 | 0.87 | 0.47 |
| 1353 | K511S | 511 | 0.85 | 0.75 | 0.79 | 0.79 | 0.04 |
| 1354 | K511F | 511 | 0.99 | 0.78 | 0.38 | 0.72 | 0.25 |
| 1355 | K511V | 511 | 0.45 | 0.92 | 0.63 | 0.67 | 0.19 |
| 1356 | P512N | 512 | 2.51 | 2.77 | 2.8 | 2.69 | 0.13 |
| 1357 | P512F | 512 | 2.04 | 2.32 | 2.29 | 2.22 | 0.13 |
| 1358 | P512Y | 512 | 1.9 | 2.03 | 2.11 | 2.02 | 0.09 |
| 1359 | P512C | 512 | 1.96 | 1.98 | 2.03 | 1.99 | 0.03 |
| 1360 | P512G | 512 | 1.86 | 1.91 | 1.96 | 1.91 | 0.04 |
| 1361 | P512D | 512 | 1.74 | 1.88 | 1.85 | 1.82 | 0.06 |
| 1362 | P512I | 512 | 1.45 | 1.69 | 1.73 | 1.62 | 0.12 |
| 1363 | P512H | 512 | 1.53 | 1.61 | 1.58 | 1.57 | 0.03 |
| 1364 | P512V | 512 | 1.46 | 1.48 | 1.69 | 1.54 | 0.11 |
| 1365 | P512W | 512 | 1.08 | 1.29 | 1.4 | 1.26 | 0.13 |
| 1366 | P512S | 512 | 0.97 | 1.09 | 1.06 | 1.04 | 0.05 |
| 1367 | P512E | 512 | 0.88 | 0.74 | 0.81 | 0.81 | 0.06 |
| 1368 | P512T | 512 | 0.5 | 0.69 | 0.49 | 0.56 | 0.09 |
| 1369 | P512R | 512 | 0.47 | 0.48 | 0.43 | 0.46 | 0.02 |
| 1370 | Y513G | 513 | 3.41 | 3.77 | 3.79 | 3.66 | 0.18 |
| 1371 | Y513Q | 513 | 3.29 | 3.52 | 3.71 | 3.51 | 0.17 |
| 1372 | Y513R | 513 | 3.28 | 3.4 | 3.53 | 3.41 | 0.1 |
| 1373 | Y513K | 513 | 3.27 | 3.36 | 3.45 | 3.36 | 0.07 |
| 1374 | Y513N | 513 | 3.11 | 3.13 | 3.18 | 3.14 | 0.03 |
| 1375 | Y513I | 513 | 2.88 | 2.96 | 2.88 | 2.91 | 0.04 |
| 1376 | Y513A | 513 | 2.6 | 2.65 | 2.8 | 2.68 | 0.08 |
| 1377 | Y513S | 513 | 2.47 | 2.62 | 2.74 | 2.61 | 0.11 |
| 1378 | Y513E | 513 | 2.53 | 2.59 | 2.68 | 2.6 | 0.06 |
| 1379 | Y513V | 513 | 2.5 | 2.51 | 2.63 | 2.55 | 0.06 |
| 1380 | Y513L | 513 | 2.35 | 2.58 | 2.54 | 2.49 | 0.1 |
| 1381 | Y513D | 513 | 2.29 | 2.59 | 2.59 | 2.49 | 0.14 |
| 1382 | Y513C | 513 | 2.31 | 2.57 | 2.47 | 2.45 | 0.11 |
| 1383 | Y513M | 513 | 2.16 | 2.37 | 2.27 | 2.27 | 0.08 |
| 1384 | Y513T | 513 | 2.21 | 2.23 | 2.33 | 2.26 | 0.05 |
| 1385 | Y513H | 513 | 1.5 | 2.33 | 2.47 | 2.1 | 0.43 |
| 1386 | Y513P | 513 | 0.85 | 1.09 | 1.15 | 1.03 | 0.13 |
| 1387 | S514P | 514 | 3.68 | 3.78 | 3.95 | 3.8 | 0.11 |
| 1388 | S514W | 514 | 1.97 | 2.14 | 1.99 | 2.03 | 0.08 |
| 1389 | S514G | 514 | 0.96 | 1.29 | 1.4 | 1.22 | 0.19 |
| 1390 | S514H | 514 | 0.89 | 0.72 | 1 | 0.87 | 0.12 |
| 1391 | S514F | 514 | 1.16 | 0.79 | 0.66 | 0.87 | 0.21 |
| 1392 | S514D | 514 | 0.73 | 1.22 | 0.64 | 0.86 | 0.25 |
| 1393 | S514R | 514 | 0.97 | 0.56 | 0.89 | 0.81 | 0.18 |
| 1394 | S514A | 514 | 0.73 | 0.94 | 0.69 | 0.79 | 0.11 |
| 1395 | S514K | 514 | 0.69 | 0.76 | 0.61 | 0.68 | 0.06 |
| 1396 | S514N | 514 | 0.69 | 0.66 | 0.24 | 0.53 | 0.21 |
| 1397 | S514L | 514 | 0.6 | 0.47 | 0.46 | 0.51 | 0.06 |
| 1398 | T515G | 515 | 2.89 | 3.08 | 2.85 | 2.94 | 0.1 |
| 1399 | T515C | 515 | 1.25 | 1.53 | 1.85 | 1.54 | 0.24 |
| 1400 | T515P | 515 | 1.31 | 1.48 | 1.49 | 1.43 | 0.09 |
| 1401 | T515A | 515 | 0.83 | 0.95 | 1.01 | 0.93 | 0.08 |
| 1402 | T515L | 515 | 0.51 | 0.71 | 0.57 | 0.6 | 0.08 |
| 1403 | T515M | 515 | 0.66 | 0.38 | 0.66 | 0.57 | 0.13 |
| 1404 | T515S | 515 | 0.4 | 0.58 | 0.44 | 0.47 | 0.08 |
| 1405 | T515Y | 515 | 0.49 | 0.56 | 0.3 | 0.45 | 0.11 |
| 1406 | K516P | 516 | 2.25 | 2.32 | 2.58 | 2.38 | 0.14 |
| 1407 | K516S | 516 | 1.2 | 1.23 | 1.25 | 1.23 | 0.02 |
| 1408 | K516R | 516 | 0.94 | 0.89 | 0.93 | 0.92 | 0.02 |
| 1409 | K516A | 516 | 0.63 | 0.72 | 0.79 | 0.71 | 0.07 |
| 1410 | K516T | 516 | 0.43 | 0.54 | 0.55 | 0.51 | 0.05 |
| 1411 | K517P | 517 | 3.68 | 3.83 | 3.89 | 3.8 | 0.09 |
| 1412 | K517D | 517 | 1.33 | 1.61 | 1.08 | 1.34 | 0.22 |
| 1413 | K517L | 517 | 0.96 | 1.32 | 1.27 | 1.18 | 0.16 |
| 1414 | K517G | 517 | 1.12 | 0.61 | 1.13 | 0.95 | 0.24 |
| 1415 | K517A | 517 | 0.42 | 1.07 | 0.67 | 0.72 | 0.27 |
| 1416 | I518P | 518 | 3.56 | 3.55 | 3.85 | 3.65 | 0.14 |
| 1417 | I518T | 518 | 2.35 | 2.64 | 2.51 | 2.5 | 0.12 |
| 1418 | I518S | 518 | 1.38 | 1.39 | 1.52 | 1.43 | 0.07 |
| 1419 | I518Q | 518 | 1.23 | 1.48 | 1.43 | 1.38 | 0.11 |
| 1420 | I518E | 518 | 0.85 | 0.91 | 1.13 | 0.96 | 0.12 |
| 1421 | I518L | 518 | 0.54 | 0.5 | 0.82 | 0.62 | 0.14 |
| 1422 | I518F | 518 | 0.38 | 0.84 | 0.4 | 0.54 | 0.21 |
| 1423 | L520M | 520 | 3.57 | 3.87 | 4.02 | 3.82 | 0.19 |
| 1424 | L520N | 520 | 3.29 | 3.55 | 3.52 | 3.45 | 0.12 |
| 1425 | L520Q | 520 | 2.85 | 3.24 | 3.31 | 3.13 | 0.2 |
| 1426 | L520H | 520 | 2.54 | 2.25 | 2.58 | 2.46 | 0.14 |
| 1427 | L520S | 520 | 2.05 | 2.41 | 2.4 | 2.29 | 0.17 |
| 1428 | L520G | 520 | 1.86 | 1.7 | 1.72 | 1.76 | 0.07 |
| 1429 | L520A | 520 | 0.64 | 0.29 | 0.45 | 0.46 | 0.14 |
| 1430 | N521F | 521 | 1.74 | 1.07 | 0.82 | 1.21 | 0.39 |
| 1431 | N521P | 521 | 1.31 | 0.44 | 1.36 | 1.04 | 0.42 |
| 1432 | N521R | 521 | 0.82 | 0.56 | 0.93 | 0.77 | 0.16 |
| 1433 | N521L | 521 | −0.16 | 1.23 | 0.79 | 0.62 | 0.58 |
| 1434 | N521E | 521 | 0.47 | 0.4 | 0.76 | 0.54 | 0.16 |
| 1435 | F522A | 522 | 2.92 | 3.19 | 3.15 | 3.09 | 0.12 |
| 1436 | F522G | 522 | 2.43 | 2.47 | 2.5 | 2.46 | 0.03 |
| 1437 | F522M | 522 | 1.06 | 1.02 | 0.63 | 0.91 | 0.2 |
| 1438 | F522C | 522 | 0.85 | 0.79 | 0.84 | 0.83 | 0.02 |
| 1439 | G523Q | 523 | 1.92 | 0.92 | 0.67 | 1.17 | 0.54 |
| 1440 | G523A | 523 | 1.52 | 0.92 | 1.07 | 1.17 | 0.25 |
| 1441 | A528I | 528 | 0.53 | 0.92 | −0.03 | 0.47 | 0.39 |
| 1442 | Y537F | 537 | 0.17 | 0.79 | 0.67 | 0.54 | 0.27 |
| 1443 | S538C | 538 | 0.41 | 0.21 | 0.69 | 0.44 | 0.2 |
| 1444 | S538N | 538 | 0.46 | 0.41 | 0.4 | 0.42 | 0.03 |
| 1445 | A541N | 541 | 2.61 | 2.6 | 2.81 | 2.67 | 0.1 |
| 1446 | A541I | 541 | 2.27 | 2.51 | 2.54 | 2.44 | 0.12 |
| 1447 | A541V | 541 | 1.66 | 1.94 | 1.82 | 1.81 | 0.11 |
| 1448 | A541M | 541 | 1.68 | 0.62 | 1.46 | 1.25 | 0.46 |
| 1449 | A541L | 541 | 0.53 | 1.06 | 0.73 | 0.77 | 0.22 |
| 1450 | A541T | 541 | 0.65 | 0.78 | 0.86 | 0.77 | 0.09 |
| 1451 | A541Q | 541 | 0.41 | 0.91 | 0.87 | 0.73 | 0.23 |
| 1452 | I543H | 543 | 1.73 | 1.94 | 1.63 | 1.77 | 0.13 |
| 1453 | I543W | 543 | 2.2 | 1.12 | 1.2 | 1.51 | 0.49 |
| 1454 | I543F | 543 | 1.22 | 1.73 | 1.41 | 1.45 | 0.21 |
| 1455 | I543G | 543 | 1.6 | 0.9 | 0.54 | 1.01 | 0.44 |
| 1456 | I543T | 543 | 0.81 | 1.33 | 0.84 | 1 | 0.24 |
| 1457 | I543A | 543 | 0.71 | 0.39 | 0.83 | 0.64 | 0.18 |
| 1458 | I543C | 543 | 0.97 | 0.5 | −0.05 | 0.47 | 0.42 |
| 1459 | I543S | 543 | 0.41 | 0.47 | 0.45 | 0.45 | 0.02 |
| 1460 | I543Q | 543 | 0.81 | 0.21 | 0.24 | 0.42 | 0.28 |
| 1461 | L544Y | 544 | 1.02 | 1.42 | 1.36 | 1.27 | 0.17 |
| 1462 | L544W | 544 | 1.04 | 0.43 | 0.64 | 0.7 | 0.25 |
| 1463 | M545E | 545 | 0.52 | 0.21 | 1.45 | 0.73 | 0.53 |
| 1464 | M545Q | 545 | −0.22 | 1.21 | 0.3 | 0.43 | 0.59 |
| 1465 | R546F | 546 | 0.96 | 1.19 | 1.55 | 1.24 | 0.24 |
| 1466 | L549D | 549 | 1.03 | 0.61 | −0.06 | 0.53 | 0.45 |
| 1467 | L552E | 552 | 2.72 | 2.69 | 2.68 | 2.69 | 0.02 |
| 1468 | L552Q | 552 | 1.26 | 1.59 | 2.1 | 1.65 | 0.35 |
| 1469 | L552K | 552 | 0.81 | 0.61 | 0.92 | 0.78 | 0.13 |
| 1470 | G553M | 553 | 2 | 2.06 | 2 | 2.02 | 0.03 |
| 1471 | G553L | 553 | 1.77 | 1.79 | 1.83 | 1.8 | 0.03 |
| 1472 | G553T | 553 | 1.69 | 1.73 | 1.82 | 1.75 | 0.06 |
| 1473 | G553I | 553 | 1.1 | 1.39 | 1.28 | 1.26 | 0.12 |
| 1474 | G553V | 553 | 0.81 | 0.96 | 0.92 | 0.9 | 0.06 |
| 1475 | G553S | 553 | 0.66 | 0.73 | 0.76 | 0.72 | 0.04 |
| 1476 | G553A | 553 | 0.56 | 0.72 | 0.6 | 0.63 | 0.07 |
| 1477 | I554C | 554 | 0.69 | 0.94 | 1.23 | 0.95 | 0.22 |
| 1478 | F555M | 555 | 0.84 | 0.74 | 0.43 | 0.67 | 0.18 |
| 1479 | N556E | 556 | 3.02 | 3.2 | 2.94 | 3.05 | 0.11 |
| 1480 | N556Q | 556 | 1.85 | 1.99 | 2.42 | 2.09 | 0.24 |
| 1481 | N556C | 556 | 1.65 | 1.81 | 2.27 | 1.91 | 0.26 |
| 1482 | N556M | 556 | 1.62 | 1.73 | 1.85 | 1.74 | 0.09 |
| 1483 | N556R | 556 | 1.66 | 1.62 | 1.69 | 1.66 | 0.03 |
| 1484 | N556A | 556 | 1.36 | 1.66 | 1.82 | 1.61 | 0.19 |
| 1485 | N556V | 556 | 1.43 | 1.38 | 1.57 | 1.46 | 0.08 |
| 1486 | N556F | 556 | 0.93 | 1.07 | 1.14 | 1.05 | 0.09 |
| 1487 | N556W | 556 | 0.54 | 0.66 | 0.62 | 0.61 | 0.05 |
| 1488 | N556K | 556 | 0.4 | 0.44 | 0.45 | 0.43 | 0.02 |
| 1489 | A557S | 557 | 1.62 | 1.74 | 1.6 | 1.66 | 0.06 |
| 1490 | A557K | 557 | 1.21 | 1.23 | 0.96 | 1.13 | 0.12 |
| 1491 | K558H | 558 | 1.98 | 2.28 | 2.18 | 2.15 | 0.12 |
| 1492 | K558M | 558 | 2.06 | 1.99 | 0.62 | 1.56 | 0.66 |
| 1493 | K558S | 558 | 1.37 | 1.7 | 1.54 | 1.54 | 0.14 |
| 1494 | K558F | 558 | 1.41 | 0.71 | 1.66 | 1.26 | 0.4 |
| 1495 | K558E | 558 | 0.81 | 1.3 | 0.62 | 0.91 | 0.29 |
| 1496 | K558T | 558 | 0.81 | 1.12 | 0.74 | 0.89 | 0.16 |
| 1497 | N559G | 559 | 1.09 | 1.54 | 1.72 | 1.45 | 0.26 |
| 1498 | N559E | 559 | 1.21 | 1.58 | 1.18 | 1.33 | 0.18 |
| 1499 | N559A | 559 | 0.81 | 1.14 | 1.16 | 1.04 | 0.16 |
| 1500 | D562I | 562 | 1.59 | 1.52 | 1.75 | 1.62 | 0.09 |
| 1501 | D562L | 562 | 1.51 | 1.54 | 1.6 | 1.55 | 0.04 |
| 1502 | D562F | 562 | 1.43 | 1.32 | 1.34 | 1.36 | 0.05 |
| 1503 | D562T | 562 | 1.02 | 1.43 | 1.42 | 1.29 | 0.19 |
| 1504 | D562Q | 562 | 1.21 | 1.19 | 1.21 | 1.2 | 0.01 |
| 1505 | D562M | 562 | 1.01 | 1.13 | 1.18 | 1.11 | 0.08 |
| 1506 | D562W | 562 | 0.68 | 1 | 0.9 | 0.86 | 0.14 |
| 1507 | D562C | 562 | 0.59 | 0.93 | 1.05 | 0.86 | 0.19 |
| 1508 | D562V | 562 | 0.68 | 0.83 | 0.86 | 0.79 | 0.08 |
| 1509 | D562K | 562 | 0.31 | 0.57 | 0.66 | 0.51 | 0.15 |
| 1510 | K564A | 564 | 1.82 | 1.29 | 1.31 | 1.47 | 0.24 |
| 1511 | K564G | 564 | 0.88 | 1.45 | 0.08 | 0.8 | 0.56 |
| 1512 | K564D | 564 | 0.62 | 0.71 | 1.03 | 0.78 | 0.17 |
| 1513 | I565R | 565 | 0.29 | −0.32 | 1.93 | 0.63 | 0.95 |
| 1514 | I565F | 565 | 0.45 | 0.66 | 0.26 | 0.46 | 0.16 |
| 1515 | I566A | 566 | 0.8 | 1.15 | 0.71 | 0.89 | 0.19 |
| 1516 | I566W | 566 | 1.21 | −0.21 | 0.44 | 0.48 | 0.58 |
| 1517 | E567W | 567 | 1.09 | 1.49 | 1.23 | 1.27 | 0.17 |
| 1518 | E567Q | 567 | 0.7 | 0.98 | 1.09 | 0.92 | 0.17 |
| 1519 | E567L | 567 | 0.38 | 0.3 | 0.59 | 0.42 | 0.12 |
| 1520 | N569P | 569 | 0.84 | 0.95 | 0.8 | 0.86 | 0.06 |
| 1521 | N569W | 569 | 0.56 | 0.65 | 0.62 | 0.61 | 0.03 |
| 1522 | T570F | 570 | 1.72 | 1.8 | 1.31 | 1.61 | 0.21 |
| 1523 | T570D | 570 | 0.8 | 0.6 | 0.33 | 0.58 | 0.19 |
| 1524 | S571W | 571 | 1.21 | 1.8 | 1.72 | 1.58 | 0.26 |
| 1525 | S571Q | 571 | 1.9 | 1.29 | 1.31 | 1.5 | 0.28 |
| 1526 | S571Y | 571 | 1.03 | 1.8 | 1.43 | 1.42 | 0.32 |
| 1527 | S571M | 571 | −0.58 | 0.89 | 1.18 | 0.5 | 0.77 |
| 1528 | E572M | 572 | 1.5 | 0.2 | 0.62 | 0.77 | 0.54 |
| 1529 | K574F | 574 | 2.41 | 2.84 | 1.54 | 2.26 | 0.54 |
| 1530 | K574V | 574 | 1.41 | 0.71 | −0.48 | 0.55 | 0.78 |
| 1531 | K574I | 574 | 0.8 | 0.6 | −0.07 | 0.44 | 0.38 |
| 1532 | G575D | 575 | 0.8 | 1.3 | −0.07 | 0.68 | 0.57 |
| 1533 | G575W | 575 | 0.4 | 0.71 | 0.21 | 0.44 | 0.21 |
| 1534 | Y577P | 577 | 1.03 | 0.6 | 1.31 | 0.98 | 0.29 |
| 1535 | Y577M | 577 | −0.18 | 1.01 | 1.31 | 0.71 | 0.64 |
| 1536 | K578F | 578 | 1.29 | 0.42 | 1.02 | 0.91 | 0.36 |
| 1537 | K578C | 578 | 1.21 | 0.2 | 0.62 | 0.67 | 0.41 |
| 1538 | K578A | 578 | 0.68 | 0.4 | 0.82 | 0.63 | 0.18 |
| 1539 | M580Q | 580 | 0.44 | 1.15 | 0.88 | 0.82 | 0.29 |
| 1540 | I581H | 58 | 0.55 | 0.3 | 0.88 | 0.58 | 0.24 |
| 1541 | N583V | 583 | 0.67 | 1.13 | 1.07 | 0.96 | 0.2 |
| 1542 | N583T | 583 | 0.66 | 0.93 | 0.53 | 0.71 | 0.16 |
| 1543 | N583G | 583 | 0.42 | 0.89 | 0.55 | 0.62 | 0.2 |
| 1544 | N583A | 583 | 0.65 | 0.57 | 0.56 | 0.59 | 0.04 |
| 1545 | N583I | 583 | 0.69 | 0.62 | 0.39 | 0.57 | 0.13 |
| 1546 | N583S | 583 | 0.45 | 0.72 | 0.42 | 0.53 | 0.13 |
| 1547 | L585K | 585 | 0.51 | 0.5 | 0.87 | 0.63 | 0.17 |
| 1548 | P586F | 586 | 1.71 | 0.89 | 1.02 | 1.21 | 0.36 |
| 1549 | G587C | 587 | 1.2 | 0.89 | 1.31 | 1.13 | 0.18 |
| 1550 | G587H | 587 | 0.8 | 0.6 | 0.84 | 0.75 | 0.1 |
| 1551 | G602A | 602 | 0.8 | 1.48 | 1.21 | 1.16 | 0.28 |
| 1552 | E604I | 604 | 0.36 | 0.89 | 0.55 | 0.6 | 0.22 |
| 1553 | E604T | 604 | 0.51 | 0.82 | 0.41 | 0.58 | 0.17 |
| 1554 | T605C | 605 | 0.47 | 1.08 | 1.16 | 0.9 | 0.31 |
| 1555 | T605G | 605 | 0.8 | 0.89 | 0.74 | 0.81 | 0.06 |
| 1556 | K607C | 607 | 0.93 | 0.57 | 0.63 | 0.71 | 0.16 |
| 1557 | S609E | 609 | 0.45 | 1.03 | 0.73 | 0.74 | 0.24 |
| 1558 | S609C | 609 | 0.64 | 0.84 | 0.68 | 0.72 | 0.09 |
| 1559 | S609K | 609 | 0.67 | 0.35 | 0.85 | 0.63 | 0.21 |
| 1560 | A610N | 610 | 0.8 | 1.59 | 1.32 | 1.24 | 0.33 |
| 1561 | A610I | 610 | 0.9 | 0.67 | 1.04 | 0.87 | 0.15 |
| 1562 | A610H | 610 | 0.9 | 0.38 | 0.63 | 0.64 | 0.21 |
| 1563 | A610Y | 610 | −0.99 | 1.3 | 1.14 | 0.49 | 1.04 |
| 1564 | L613G | 613 | 0.99 | 1.08 | 1.17 | 1.08 | 0.07 |
| 1565 | E614I | 614 | 0.52 | 0.21 | 1.65 | 0.79 | 0.62 |
| 1566 | K617V | 617 | 0.39 | 0.45 | 0.54 | 0.46 | 0.06 |
| 1567 | K617C | 617 | 0.4 | 0.42 | 0.46 | 0.43 | 0.02 |
| 1568 | K617Q | 617 | 0.5 | 0.51 | 0.26 | 0.43 | 0.12 |
| 1569 | Q618D | 618 | 0.8 | 0.59 | 0.48 | 0.62 | 0.13 |
| 1570 | N619R | 619 | 0.26 | 0.59 | 0.88 | 0.58 | 0.26 |
| 1571 | N619C | 619 | 0.44 | 0.53 | 0.58 | 0.52 | 0.06 |
| 1572 | K620F | 620 | 0.55 | 0.21 | 0.52 | 0.43 | 0.15 |
| 1573 | S624W | 624 | 0.52 | 1.13 | 0.11 | 0.59 | 0.42 |
| 1574 | S625N | 625 | 0.44 | 0.48 | 0.44 | 0.46 | 0.02 |
| 1575 | K626I | 626 | 1.04 | 0.44 | 0.97 | 0.82 | 0.27 |
| 1576 | K626V | 626 | 0.81 | 0.12 | 0.82 | 0.58 | 0.33 |
| 1577 | K626Y | 626 | 0.52 | 0.37 | 0.73 | 0.54 | 0.15 |
| 1578 | H634K | 634 | 0.08 | 1.08 | 0.55 | 0.57 | 0.41 |
| 1579 | L636H | 636 | 0.82 | 0.22 | 0.66 | 0.57 | 0.25 |
| 1580 | D638I | 638 | 1.51 | 0.22 | −0.03 | 0.57 | 0.68 |
| 1581 | D638C | 638 | 0.85 | 0.24 | 0.38 | 0.49 | 0.26 |
| 1582 | D638S | 638 | 0.41 | 0.04 | 0.88 | 0.45 | 0.35 |
| 1583 | Y639N | 639 | 0.82 | 0.92 | 1.07 | 0.93 | 0.1 |
| 1584 | Y639M | 639 | 0.82 | 1.32 | −0.03 | 0.7 | 0.56 |
| 1585 | Y639G | 639 | 0.82 | 0.78 | 0.19 | 0.6 | 0.29 |
| 1586 | Y639T | 639 | 0.64 | 0.04 | 0.89 | 0.52 | 0.36 |
| 1587 | Y639H | 639 | 0.13 | 1.32 | −0.03 | 0.47 | 0.6 |
| 1588 | N642A | 642 | 0.28 | 0.83 | 1.12 | 0.74 | 0.35 |
| 1589 | N642M | 642 | 0.32 | 0.8 | 0.47 | 0.53 | 0.2 |
| 1590 | C643T | 643 | 0.13 | 1.24 | 0.66 | 0.68 | 0.45 |
| 1591 | C643F | 643 | 0.53 | 0.23 | 0.53 | 0.43 | 0.14 |
| 1592 | I644Y | 644 | 0.66 | 0.33 | 0.61 | 0.53 | 0.14 |
| 1593 | I644A | 644 | 0.44 | 0.34 | 0.72 | 0.5 | 0.16 |
| 1594 | A645M | 645 | 0.73 | 0.74 | 0.38 | 0.62 | 0.17 |
| 1595 | A645N | 645 | 0.47 | 0.52 | 0.58 | 0.52 | 0.04 |
| 1596 | A645Q | 645 | 0.57 | 0.45 | 0.42 | 0.48 | 0.07 |
| 1597 | P648C | 648 | 1.28 | 0.84 | 0.82 | 0.98 | 0.21 |
| 1598 | P648M | 648 | 0.13 | 1.02 | 0.76 | 0.64 | 0.38 |
| 1599 | P648I | 648 | 0.67 | 0.24 | 0.57 | 0.49 | 0.19 |
| 1600 | F653R | 653 | 0.95 | 0.56 | 1.02 | 0.85 | 0.2 |
| 1601 | G654P | 654 | 0.61 | 0.44 | 0.75 | 0.6 | 0.13 |
| 1602 | F655H | 655 | 0.45 | 0.72 | 0.99 | 0.72 | 0.22 |
| 1603 | D656K | 656 | 0.88 | 0.87 | 0.55 | 0.77 | 0.15 |
| 1604 | D656G | 656 | 0.5 | 0.78 | 0.73 | 0.67 | 0.12 |
| 1605 | S658D | 658 | 0.3 | 0.78 | 0.41 | 0.5 | 0.21 |
| 1606 | D659K | 659 | 0.45 | 0.35 | 0.61 | 0.47 | 0.1 |
| 1607 | S661G | 661 | 0.88 | 0.97 | 0.47 | 0.77 | 0.22 |
| 1608 | S661Q | 661 | 0.72 | 0.37 | 0.39 | 0.49 | 0.16 |
| 1609 | S661M | 661 | 0.06 | 0.93 | 0.44 | 0.48 | 0.36 |
| 1610 | E664R | 664 | 0.45 | 0.93 | 0.43 | 0.61 | 0.23 |
| 1611 | E664F | 664 | 0.61 | 0.71 | 0.46 | 0.59 | 0.1 |
| 1612 | E664S | 664 | 0.27 | 0.42 | 0.61 | 0.43 | 0.14 |
| 1613 | S667R | 667 | 1.52 | 0.53 | 0.97 | 1.01 | 0.41 |
| 1614 | G668Q | 668 | 2.7 | 0.56 | −0.3 | 0.99 | 1.26 |
| 1615 | G668M | 668 | 0.25 | 0.36 | 0.68 | 0.43 | 0.18 |
| 1616 | F669P | 669 | 1.46 | 1.42 | 1.43 | 1.44 | 0.02 |
| 1617 | F669R | 669 | 1.62 | −0.27 | 0.17 | 0.51 | 0.81 |
| 1618 | L675C | 675 | 1.34 | 1.23 | 1.78 | 1.45 | 0.24 |
| 1619 | Q676V | 676 | 1.02 | 1.2 | 1.06 | 1.1 | 0.08 |
| 1620 | Q676T | 676 | 0.88 | 1.2 | 0.66 | 0.91 | 0.22 |
| 1621 | Q676S | 676 | 0.6 | 1.13 | 0.89 | 0.87 | 0.22 |
| 1622 | Q676W | 676 | 0.14 | 0.5 | 0.93 | 0.52 | 0.32 |
| 1623 | Y678F | 678 | 1.28 | 1.81 | 1.71 | 1.6 | 0.23 |
| 1624 | Y678H | 678 | 0.67 | 1.05 | 1.32 | 1.01 | 0.27 |
| 1625 | I680A | 680 | 1.63 | 1.34 | 1.34 | 1.44 | 0.14 |
| 1626 | I680V | 680 | 1.2 | 1.4 | 1.26 | 1.29 | 0.08 |
| 1627 | I680Q | 680 | 1.29 | 1.1 | 1.36 | 1.25 | 0.11 |
| 1628 | I680S | 680 | 1.03 | 1.04 | 1.07 | 1.05 | 0.02 |
| 1629 | I680N | 680 | 1.06 | 1.07 | 0.79 | 0.97 | 0.13 |
| 1630 | I680H | 680 | 0.92 | 1.17 | 0.78 | 0.96 | 0.16 |
| 1631 | I680F | 680 | 0.52 | 0.58 | 0.38 | 0.49 | 0.09 |
| 1632 | D681I | 681 | 1.11 | 1.21 | 1.16 | 1.16 | 0.04 |
| 1633 | D681W | 681 | 1.11 | 0.9 | 1.01 | 1.01 | 0.08 |
| 1634 | D681M | 681 | 0.53 | 0.68 | 0.79 | 0.67 | 0.11 |
| 1635 | D681Q | 681 | 0.48 | 0.8 | 0.65 | 0.64 | 0.13 |
| 1636 | D681T | 681 | 0.59 | 0.62 | 0.7 | 0.64 | 0.05 |
| 1637 | D681R | 681 | 0.54 | 0.49 | 0.58 | 0.54 | 0.04 |
| 1638 | D681K | 681 | 0.45 | 0.42 | 0.47 | 0.45 | 0.02 |
| 1639 | W682D | 682 | 1.37 | 1.35 | 1.35 | 1.36 | 0.01 |
| 1640 | W682K | 682 | 0.98 | 1.08 | 1.1 | 1.05 | 0.05 |
| 1641 | W682I | 682 | 0.83 | 1.06 | 0.92 | 0.94 | 0.09 |
| 1642 | W682N | 682 | 0.91 | 0.82 | 1.02 | 0.92 | 0.08 |
| 1643 | W682T | 682 | 0.88 | 0.88 | 0.97 | 0.91 | 0.04 |
| 1644 | W682Q | 682 | 0.86 | 0.82 | 1 | 0.89 | 0.08 |
| 1645 | W682E | 682 | 0.87 | 0.85 | 0.83 | 0.85 | 0.02 |
| 1646 | W682A | 682 | 0.74 | 0.82 | 0.94 | 0.83 | 0.08 |
| 1647 | W682V | 682 | 0.7 | 0.86 | 0.77 | 0.78 | 0.06 |
| 1648 | W682M | 682 | 0.7 | 0.72 | 0.67 | 0.7 | 0.02 |
| 1649 | W682G | 682 | 0.58 | 0.58 | 0.55 | 0.57 | 0.01 |
| 1650 | T683F | 683 | 1.44 | 1.61 | 1.34 | 1.46 | 0.11 |
| 1651 | T683Y | 683 | 0.59 | 0.73 | 0.69 | 0.67 | 0.06 |
| 1652 | I685Y | 685 | 1.22 | 0.89 | 1.2 | 1.11 | 0.15 |
| 1653 | S686R | 686 | 0.57 | 0.99 | −0.22 | 0.45 | 0.5 |
| 1654 | S686T | 686 | 0.56 | 0.46 | 0.24 | 0.42 | 0.14 |
| 1655 | E687N | 687 | 0.54 | 0.58 | 0.39 | 0.51 | 0.08 |
| 1656 | K688D | 688 | 2.15 | 2.25 | 0.24 | 1.55 | 0.92 |
| 1657 | K688V | 688 | 0.42 | 0.44 | 0.47 | 0.44 | 0.02 |
| 1658 | D691R | 691 | 0.36 | 1.29 | 0.23 | 0.62 | 0.47 |
| 1659 | L692M | 692 | 0.5 | 0.61 | 0.62 | 0.58 | 0.05 |
| 1660 | L693Q | 693 | 1.87 | 1.34 | 1.83 | 1.68 | 0.24 |
| 1661 | L693W | 693 | 1.48 | 1.32 | 1.95 | 1.58 | 0.27 |
| 1662 | L693G | 693 | 0.98 | 1.55 | 1.45 | 1.33 | 0.25 |
| 1663 | L693E | 693 | 0.46 | 1 | 0.39 | 0.61 | 0.27 |
| 1664 | L693M | 693 | 0.48 | 0.53 | 0.54 | 0.52 | 0.03 |
| 1665 | L693A | 693 | 0.94 | 0.4 | 0.04 | 0.46 | 0.37 |
| 1666 | L693D | 693 | 0.54 | 0.53 | 0.27 | 0.45 | 0.13 |
| 1667 | L693T | 693 | 0.34 | 0.32 | 0.68 | 0.45 | 0.16 |
| 1668 | Q694G | 694 | 0.83 | 1.35 | 1.37 | 1.18 | 0.25 |
| 1669 | Q694W | 694 | 1.52 | 0.83 | 1.15 | 1.17 | 0.28 |
| 1670 | Q694C | 694 | 1.15 | 0.65 | 1.08 | 0.96 | 0.22 |
| 1671 | Q694R | 694 | 0.91 | 1.08 | 0.39 | 0.79 | 0.29 |
| 1672 | Q694S | 694 | 0.14 | 2.18 | −0.02 | 0.77 | 1 |
| 1673 | Q694Y | 694 | 0.29 | 0.79 | 0.64 | 0.57 | 0.21 |
| 1674 | Q694K | 694 | 0.46 | 0.47 | 0.68 | 0.53 | 0.1 |
| 1675 | Q694I | 694 | 0.29 | 0.65 | 0.39 | 0.44 | 0.15 |
| 1676 | E695S | 695 | 2.74 | 2.8 | 1.37 | 2.3 | 0.66 |
| 1677 | G697I | 697 | 1.32 | 1.7 | 0.9 | 1.3 | 0.33 |
| 1678 | G697N | 697 | 0.98 | 0.62 | 0.67 | 0.76 | 0.16 |
| 1679 | G697P | 697 | 0.46 | 0.47 | 0.61 | 0.51 | 0.07 |
| 1680 | Q698F | 698 | 0.14 | 1.26 | 1 | 0.8 | 0.48 |
| 1681 | Q698A | 698 | 0.14 | 0.81 | 0.39 | 0.45 | 0.28 |
| 1682 | L699Y | 699 | 0.43 | 1.29 | 0.68 | 0.8 | 0.36 |
| 1683 | L699F | 699 | 0.71 | 0.73 | 0.79 | 0.75 | 0.03 |
| 1684 | L699C | 699 | 0.36 | 0.25 | 1.31 | 0.64 | 0.47 |
| 1685 | Y700V | 700 | 1.28 | 1.46 | 1.08 | 1.27 | 0.15 |
| 1686 | Y700A | 700 | 0.94 | 1.21 | 1.2 | 1.12 | 0.12 |
| 1687 | Y700G | 700 | 0.7 | 1.26 | 1.12 | 1.03 | 0.24 |
| 1688 | Y700I | 700 | 0.95 | 0.65 | 0.21 | 0.6 | 0.3 |
| 1689 | Y700T | 700 | 0.54 | 0.25 | 0.68 | 0.49 | 0.18 |
| 1690 | L701P | 701 | 1.61 | 1.18 | 1.15 | 1.31 | 0.21 |
| 1691 | L701W | 701 | 0.94 | 0.87 | 1.27 | 1.02 | 0.17 |
| 1692 | F702G | 702 | 2.82 | 2.75 | 2.85 | 2.81 | 0.04 |
| 1693 | F702N | 702 | 2.71 | 2.69 | 2.89 | 2.77 | 0.09 |
| 1694 | F702A | 702 | 2.49 | 2.54 | 2.71 | 2.58 | 0.1 |
| 1695 | F702Q | 702 | 2.31 | 2.03 | 2.4 | 2.25 | 0.16 |
| 1696 | F702H | 702 | 1.96 | 2 | 1.85 | 1.94 | 0.06 |
| 1697 | F702T | 702 | 1.72 | 1.73 | 1.7 | 1.72 | 0.01 |
| 1698 | F702M | 702 | 1.52 | 1.73 | 1.7 | 1.65 | 0.09 |
| 1699 | F702S | 702 | 1.27 | 1.35 | 1.35 | 1.32 | 0.04 |
| 1700 | F702V | 702 | 0.95 | 0.94 | 1.03 | 0.97 | 0.04 |
| 1701 | F702C | 702 | 0.55 | 0.79 | 0.7 | 0.68 | 0.1 |
| 1702 | F702L | 702 | 0.46 | 0.52 | 0.51 | 0.5 | 0.03 |
| 1703 | Q703C | 703 | 1.24 | 1.63 | 2.06 | 1.64 | 0.34 |
| 1704 | K711P | 711 | 1.73 | 1.48 | 1.74 | 1.65 | 0.12 |
| 1705 | K711L | 711 | 0.31 | 0.46 | 0.54 | 0.44 | 0.1 |
| 1706 | K712W | 712 | 2.68 | 2.64 | 2.57 | 2.63 | 0.04 |
| 1707 | K712F | 712 | 2.35 | 2.71 | 2.74 | 2.6 | 0.18 |
| 1708 | K712Y | 712 | 2.42 | 2.5 | 2.39 | 2.44 | 0.04 |
| 1709 | K712G | 712 | 2.06 | 2.27 | 1.84 | 2.05 | 0.17 |
| 1710 | K712H | 712 | 1.88 | 2.19 | 2.08 | 2.05 | 0.13 |
| 1711 | K712S | 712 | 1.11 | 0.95 | 1.2 | 1.09 | 0.1 |
| 1712 | K712R | 712 | 0.85 | 1.37 | 0.88 | 1.03 | 0.24 |
| 1713 | K712C | 712 | 0.83 | 0.24 | 1.26 | 0.78 | 0.42 |
| 1714 | K712A | 712 | 0.86 | 0.24 | 0.98 | 0.69 | 0.32 |
| 1715 | K712Q | 712 | 0.13 | 0.93 | 0.58 | 0.55 | 0.33 |
| 1716 | S713R | 713 | 1.23 | 0.94 | −0.02 | 0.72 | 0.54 |
| 1717 | T714Y | 714 | 1.74 | 1.55 | 1.77 | 1.69 | 0.1 |
| 1718 | T714W | 714 | 0.65 | 0.65 | 0.75 | 0.68 | 0.05 |
| 1719 | T714N | 714 | 0.72 | 0.89 | 0.38 | 0.66 | 0.21 |
| 1720 | N716R | 716 | 1.71 | 1.88 | 1.96 | 1.85 | 0.11 |
| 1721 | N716M | 716 | 1.32 | 1.49 | 1.47 | 1.43 | 0.08 |
| 1722 | N716I | 716 | 1.18 | 1.25 | 1.29 | 1.24 | 0.04 |
| 1723 | N716V | 716 | 1.22 | 1.16 | 1.22 | 1.2 | 0.03 |
| 1724 | N716T | 716 | 1.04 | 1.22 | 1.12 | 1.12 | 0.07 |
| 1725 | N716C | 716 | 0.69 | 1.03 | 0.49 | 0.73 | 0.23 |
| 1726 | N716Q | 716 | 0.55 | 0.81 | 0.7 | 0.69 | 0.11 |
| 1727 | N716A | 716 | 0.53 | 0.49 | 0.45 | 0.49 | 0.04 |
| 1728 | N716K | 716 | 0.46 | 0.53 | 0.46 | 0.48 | 0.03 |
| 1729 | D717P | 717 | 2.05 | 2.25 | 2.06 | 2.12 | 0.09 |
| 1730 | D717A | 717 | 0.68 | 0.61 | 0.65 | 0.65 | 0.03 |
| 1731 | L719K | 719 | 0.42 | 0.58 | 0.63 | 0.54 | 0.09 |
| 1732 | K725Y | 725 | 0.81 | 0.68 | 0.46 | 0.65 | 0.14 |
| 1733 | L727H | 727 | 0.75 | 0.66 | 0.43 | 0.61 | 0.13 |
| 1734 | L727T | 727 | 0.14 | 0.64 | 0.89 | 0.56 | 0.31 |
| 1735 | L727I | 727 | 0.36 | −0.05 | 0.99 | 0.43 | 0.43 |
| 1736 | F728T | 728 | 1.39 | 0.93 | −0.02 | 0.76 | 0.59 |
| 1737 | S729H | 729 | 0.83 | 0.46 | 0.38 | 0.56 | 0.2 |
| 1738 | S729K | 729 | 1.06 | 0.23 | −0.02 | 0.42 | 0.46 |
| 1739 | E730L | 730 | 0.92 | 3.32 | 2.58 | 2.28 | 1 |
| 1740 | E730M | 730 | 1.75 | 1.33 | −0.02 | 1.02 | 0.76 |
| 1741 | E730I | 730 | 0.83 | 1.33 | 0.67 | 0.95 | 0.28 |
| 1742 | E730G | 730 | 1.24 | 0.64 | 0.54 | 0.8 | 0.31 |
| 1743 | E730V | 730 | 0.61 | 0.23 | 1.01 | 0.62 | 0.32 |
| 1744 | E731P | 731 | 1.47 | 4.46 | 3.64 | 3.19 | 1.26 |
| 1745 | E731A | 731 | 0.65 | 1.77 | −0.43 | 0.67 | 0.9 |
| 1746 | E731L | 731 | 0.65 | 0.23 | 0.83 | 0.57 | 0.25 |
| 1747 | N732T | 732 | 1.36 | 4.47 | 3.65 | 3.16 | 1.31 |
| 1748 | N732D | 732 | 1.24 | 1.22 | 0.49 | 0.98 | 0.35 |
| 1749 | L733I | 733 | 0.55 | 0.67 | 0.57 | 0.59 | 0.05 |
| 1750 | L733K | 733 | 2.09 | −0.08 | −0.59 | 0.47 | 1.16 |
| 1751 | D735R | 735 | 0.41 | 0.46 | 0.7 | 0.52 | 0.13 |
| 1752 | D735K | 735 | 0.83 | 0.32 | 0.31 | 0.49 | 0.25 |
| 1753 | V737Q | 737 | 0.82 | 1.14 | 0.37 | 0.77 | 0.32 |
| 1754 | L738E | 738 | 1.12 | 1.05 | 1.01 | 1.06 | 0.05 |
| 1755 | N741G | 741 | 1.15 | 1.17 | 1.44 | 1.26 | 0.13 |
| 1756 | N741C | 741 | 0.48 | 0.47 | 0.96 | 0.64 | 0.23 |
| 1757 | E743N | 743 | 0.72 | 0.89 | 0.91 | 0.84 | 0.09 |
| 1758 | A744N | 744 | 3.28 | 3.38 | 3.54 | 3.4 | 0.11 |
| 1759 | A744P | 744 | 2.39 | 2.69 | 2.65 | 2.58 | 0.13 |
| 1760 | A744T | 744 | 2.4 | 2.61 | 2.67 | 2.56 | 0.11 |
| 1761 | A744C | 744 | 1.68 | 1.77 | 1.8 | 1.75 | 0.05 |
| 1762 | A744S | 744 | 1.51 | 1.79 | 1.78 | 1.69 | 0.13 |
| 1763 | E745P | 745 | 0.71 | 1.04 | 0.67 | 0.8 | 0.17 |
| 1764 | F748G | 748 | 2.41 | 2.55 | 2.55 | 2.5 | 0.07 |
| 1765 | F748A | 748 | 2.38 | 2.37 | 2.59 | 2.44 | 0.1 |
| 1766 | F748S | 748 | 2.38 | 2.48 | 2.44 | 2.43 | 0.04 |
| 1767 | F748H | 748 | 2.2 | 2.28 | 2.47 | 2.32 | 0.11 |
| 1768 | F748W | 748 | 1.84 | 1.93 | 1.89 | 1.89 | 0.04 |
| 1769 | F748T | 748 | 1.75 | 1.74 | 1.95 | 1.81 | 0.1 |
| 1770 | F748R | 748 | 1.23 | 1.46 | 1.69 | 1.46 | 0.19 |
| 1771 | F748V | 748 | 1.24 | 1.25 | 1.2 | 1.23 | 0.02 |
| 1772 | F748E | 748 | 0.84 | 1.2 | 1.33 | 1.12 | 0.2 |
| 1773 | F748M | 748 | 0.73 | 1.28 | 1.36 | 1.12 | 0.28 |
| 1774 | F748N | 748 | 1.01 | 1.26 | 0.91 | 1.06 | 0.15 |
| 1775 | F748Q | 748 | 1.07 | 0.89 | 1.22 | 1.06 | 0.14 |
| 1776 | F748C | 748 | 1.02 | 0.78 | 1.06 | 0.95 | 0.12 |
| 1777 | F748D | 748 | 1.15 | 1 | 0.6 | 0.92 | 0.23 |
| 1778 | F748I | 748 | 0.24 | 0.63 | 0.41 | 0.43 | 0.16 |
| 1779 | K750P | 750 | 3.95 | 4.11 | 4.24 | 4.1 | 0.12 |
| 1780 | K750G | 750 | 3.13 | 3.25 | 3.33 | 3.24 | 0.08 |
| 1781 | K750A | 750 | 1.95 | 1.96 | 2.04 | 1.98 | 0.04 |
| 1782 | K750E | 750 | 1.74 | 1.89 | 1.8 | 1.81 | 0.06 |
| 1783 | K750W | 750 | 1.81 | 1.71 | 1.53 | 1.69 | 0.12 |
| 1784 | K750S | 750 | 1.59 | 1.63 | 1.72 | 1.65 | 0.06 |
| 1785 | K750F | 750 | 1.56 | 1.58 | 1.6 | 1.58 | 0.02 |
| 1786 | K750Y | 750 | 1.57 | 1.45 | 1.55 | 1.53 | 0.05 |
| 1787 | K750H | 750 | 1.29 | 1.37 | 1.41 | 1.36 | 0.05 |
| 1788 | K750N | 750 | 0.9 | 1.04 | 1 | 0.98 | 0.06 |
| 1789 | K750L | 750 | 0.76 | 0.55 | 0.68 | 0.66 | 0.09 |
| 1790 | K750T | 750 | 0.67 | 0.62 | 0.61 | 0.63 | 0.03 |
| 1791 | S751A | 751 | 3.59 | 3.78 | 3.93 | 3.77 | 0.14 |
| 1792 | S751G | 751 | 3.08 | 3.43 | 3.39 | 3.3 | 0.16 |
| 1793 | S751Q | 751 | 3.01 | 3.09 | 3.16 | 3.09 | 0.06 |
| 1794 | S751L | 751 | 2.97 | 3.09 | 3.19 | 3.08 | 0.09 |
| 1795 | S751H | 751 | 2.59 | 2.88 | 3.05 | 2.84 | 0.19 |
| 1796 | S751C | 751 | 2.51 | 2.83 | 2.79 | 2.71 | 0.15 |
| 1797 | S751P | 751 | 2.62 | 2.76 | 2.75 | 2.71 | 0.06 |
| 1798 | S751M | 751 | 2.35 | 2.54 | 2.57 | 2.48 | 0.1 |
| 1799 | S751N | 751 | 2.48 | 2.49 | 2.39 | 2.45 | 0.04 |
| 1800 | S751E | 751 | 2.32 | 2.4 | 2.38 | 2.37 | 0.03 |
| 1801 | S751R | 751 | 1.89 | 1.92 | 2 | 1.94 | 0.05 |
| 1802 | S751F | 751 | 1.44 | 1.37 | 1.59 | 1.47 | 0.09 |
| 1803 | S751V | 751 | 1.39 | 1.4 | 1.36 | 1.39 | 0.02 |
| 1804 | S751T | 751 | 1.23 | 1.28 | 1.29 | 1.27 | 0.03 |
| 1805 | S751D | 751 | 0.31 | 0.78 | 0.75 | 0.62 | 0.21 |
| 1806 | S752Y | 752 | 2.59 | 2.71 | 2.67 | 2.66 | 0.05 |
| 1807 | S752F | 752 | 2.27 | 2.46 | 2.5 | 2.41 | 0.1 |
| 1808 | S752H | 752 | 2.27 | 2.28 | 2.13 | 2.23 | 0.07 |
| 1809 | S752I | 752 | 1.9 | 2.14 | 2.01 | 2.02 | 0.1 |
| 1810 | S752C | 752 | 1.57 | 1.7 | 1.68 | 1.65 | 0.06 |
| 1811 | S752V | 752 | 1.39 | 1.56 | 1.46 | 1.47 | 0.07 |
| 1812 | S752M | 752 | 1.17 | 1.45 | 1.29 | 1.3 | 0.11 |
| 1813 | S752G | 752 | 1.27 | 1.22 | 1.16 | 1.22 | 0.04 |
| 1814 | S752W | 752 | 1.17 | 1.16 | 1.26 | 1.2 | 0.05 |
| 1815 | S752Q | 752 | 1.22 | 1.18 | 1.1 | 1.17 | 0.05 |
| 1816 | S752L | 752 | 0.41 | 0.48 | 0.49 | 0.46 | 0.04 |
| 1817 | I753E | 753 | 0.36 | 0.45 | 0.45 | 0.42 | 0.04 |
| 1818 | K754G | 754 | 3.52 | 3.77 | 3.8 | 3.69 | 0.13 |
| 1819 | K754H | 754 | 3.55 | 3.6 | 3.84 | 3.66 | 0.13 |
| 1820 | K754W | 754 | 3.22 | 3.06 | 3.2 | 3.16 | 0.07 |
| 1821 | K754S | 754 | 2.91 | 3.1 | 2.99 | 3 | 0.08 |
| 1822 | K754V | 754 | 2.66 | 2.78 | 2.85 | 2.76 | 0.08 |
| 1823 | K754Y | 754 | 2.63 | 2.79 | 2.85 | 2.76 | 0.09 |
| 1824 | K754I | 754 | 2.66 | 2.73 | 2.83 | 2.74 | 0.07 |
| 1825 | K754F | 754 | 2.67 | 2.65 | 2.72 | 2.68 | 0.03 |
| 1826 | K754D | 754 | 2.22 | 2.57 | 2.59 | 2.46 | 0.17 |
| 1827 | K754C | 754 | 2.06 | 2.73 | 2.33 | 2.37 | 0.27 |
| 1828 | K754A | 754 | 2.17 | 2.4 | 2.36 | 2.31 | 0.1 |
| 1829 | K754L | 754 | 2.09 | 2.28 | 2.35 | 2.24 | 0.11 |
| 1830 | K754P | 754 | 1.84 | 1.77 | 1.72 | 1.78 | 0.05 |
| 1831 | K754T | 754 | 1.42 | 1.56 | 1.55 | 1.51 | 0.07 |
| 1832 | K754N | 754 | 0.78 | 0.84 | 0.86 | 0.83 | 0.04 |
| 1833 | K754Q | 754 | 0.68 | 0.79 | 0.77 | 0.75 | 0.05 |
| 1834 | K754E | 754 | 0.65 | 0.68 | 0.73 | 0.68 | 0.03 |
| 1835 | P756M | 756 | 2.25 | 1.46 | 1.05 | 1.59 | 0.5 |
| 1836 | P756I | 756 | 1.62 | 1.46 | 1.65 | 1.58 | 0.08 |
| 1837 | P756K | 756 | 1.37 | 1.71 | 1.45 | 1.51 | 0.15 |
| 1838 | P756H | 756 | 1.03 | 1.31 | 1.61 | 1.32 | 0.24 |
| 1839 | P756N | 756 | 0.11 | 1.6 | 2.03 | 1.25 | 0.82 |
| 1840 | P756L | 756 | 0.97 | 1.4 | 0.84 | 1.07 | 0.24 |
| 1841 | P756S | 756 | 0.9 | 0.68 | 1.11 | 0.9 | 0.18 |
| 1842 | P756T | 756 | 0.44 | 0.82 | 0.91 | 0.72 | 0.21 |
| 1843 | I757W | 757 | 3.29 | 3.3 | 4.2 | 3.6 | 0.43 |
| 1844 | I757P | 757 | 2.89 | 3.01 | 2.85 | 2.91 | 0.07 |
| 1845 | I757K | 757 | 2.34 | 2.35 | 2.55 | 2.42 | 0.1 |
| 1846 | I757F | 757 | 1.95 | 2.16 | 2.3 | 2.14 | 0.14 |
| 1847 | I757A | 757 | 1.96 | 2.1 | 1.85 | 1.97 | 0.1 |
| 1848 | I757R | 757 | 1.45 | 1.91 | 1.45 | 1.6 | 0.22 |
| 1849 | I757Y | 757 | 1.72 | 1.75 | 1.25 | 1.57 | 0.23 |
| 1850 | I757L | 757 | 1.1 | 1.3 | 1.17 | 1.19 | 0.09 |
| 1851 | I757S | 757 | 0.81 | 1.06 | 0.87 | 0.91 | 0.11 |
| 1852 | I757Q | 757 | 0.85 | 0.1 | 1.11 | 0.69 | 0.43 |
| 1853 | I757C | 757 | 0.52 | −0.08 | 1.2 | 0.55 | 0.53 |
| 1854 | I757G | 757 | 0.35 | 0.58 | 0.5 | 0.48 | 0.09 |
| 1855 | I757M | 757 | 0.36 | 0.6 | 0.45 | 0.47 | 0.1 |
| 1856 | I758A | 758 | 1.77 | 1.91 | 1.77 | 1.82 | 0.07 |
| 1857 | I758E | 758 | 1.58 | 1.84 | 1.86 | 1.76 | 0.13 |
| 1858 | I758G | 758 | 1.39 | 1.66 | 1.48 | 1.51 | 0.11 |
| 1859 | I758Q | 758 | 1.66 | 1.29 | 1.39 | 1.45 | 0.16 |
| 1860 | I758S | 758 | 1.33 | 1.46 | 1.39 | 1.39 | 0.05 |
| 1861 | I758T | 758 | 0.97 | 1.07 | 1.44 | 1.16 | 0.2 |
| 1862 | I758C | 758 | 1.04 | 1.01 | 1.15 | 1.07 | 0.06 |
| 1863 | I758V | 758 | 0.95 | 1.06 | 1.03 | 1.01 | 0.05 |
| 1864 | I758K | 758 | 0.85 | 0.82 | 0.69 | 0.79 | 0.07 |
| 1865 | G762K | 762 | 0.46 | 0.05 | 0.89 | 0.47 | 0.34 |
| 1866 | I764Q | 764 | 0.7 | 0.75 | 0.49 | 0.65 | 0.11 |
| 1867 | V766Y | 766 | 0.51 | 0.89 | −0.06 | 0.45 | 0.39 |
| 1868 | N767R | 767 | 0.25 | 0.56 | 0.46 | 0.43 | 0.13 |
| 1869 | R768K | 768 | 1.4 | 0.89 | 1.48 | 1.26 | 0.26 |
| 1870 | T769L | 769 | 0.46 | 0.35 | 0.57 | 0.46 | 0.09 |
| 1871 | E771W | 771 | 1.53 | 1.44 | 1.65 | 1.54 | 0.09 |
| 1872 | E771A | 771 | 0.88 | 0.86 | 0.95 | 0.9 | 0.04 |
| 1873 | E771R | 771 | 0.77 | 0.75 | 0.58 | 0.7 | 0.09 |
| 1874 | E771C | 771 | 0.76 | 0.6 | 0.7 | 0.69 | 0.06 |
| 1875 | E771Y | 771 | 0.56 | 0.73 | 0.69 | 0.66 | 0.07 |
| 1876 | E771I | 771 | 0.7 | 0.68 | 0.36 | 0.58 | 0.16 |
| 1877 | E771T | 771 | 0.62 | 0.59 | 0.53 | 0.58 | 0.04 |
| 1878 | E771F | 771 | 0.52 | 0.75 | 0.43 | 0.57 | 0.14 |
| 1879 | E771K | 771 | 0.48 | 0.53 | 0.66 | 0.56 | 0.08 |
| 1880 | E771M | 771 | 0.5 | 0.43 | 0.69 | 0.54 | 0.11 |
| 1881 | E771S | 771 | 0.48 | 0.56 | 0.51 | 0.52 | 0.03 |
| 1882 | E771H | 771 | 0.47 | 0.38 | 0.69 | 0.51 | 0.13 |
| 1883 | E771Q | 771 | 0.37 | 0.64 | 0.49 | 0.5 | 0.11 |
| 1884 | E771V | 771 | 0.26 | 0.58 | 0.41 | 0.42 | 0.13 |
| 1885 | A772W | 772 | 0.79 | 0.19 | 0.89 | 0.62 | 0.31 |
| 1886 | E773I | 773 | 0.88 | 0.36 | 0.58 | 0.6 | 0.22 |
| 1887 | E773P | 773 | 0.68 | 0.48 | 0.25 | 0.47 | 0.17 |
| 1888 | E774W | 774 | 1.49 | 1.89 | 1.73 | 1.7 | 0.17 |
| 1889 | E774M | 774 | 1.75 | 1.58 | 1.27 | 1.53 | 0.2 |
| 1890 | E774S | 774 | 0.96 | 0.73 | 0.66 | 0.78 | 0.13 |
| 1891 | E774V | 774 | 0.51 | 0.88 | 0.93 | 0.77 | 0.19 |
| 1892 | E774T | 774 | 0.54 | 0.88 | 0.72 | 0.71 | 0.14 |
| 1893 | E774K | 774 | 0.54 | 0.74 | 0.74 | 0.67 | 0.09 |
| 1894 | E774L | 774 | 0.87 | 0.43 | 0.65 | 0.65 | 0.18 |
| 1895 | E774I | 774 | 0.8 | 0.78 | 0.12 | 0.56 | 0.32 |
| 1896 | E774R | 774 | 0.71 | 0.24 | 0.6 | 0.52 | 0.2 |
| 1897 | E774Q | 774 | 0.84 | 0.34 | 0.28 | 0.49 | 0.25 |
| 1898 | E774H | 774 | 0.8 | 0.39 | 0.22 | 0.47 | 0.24 |
| 1899 | K775C | 775 | 0.7 | 0.51 | 0.34 | 0.51 | 0.15 |
| 1900 | Q777R | 777 | 0.84 | 0.57 | 0.54 | 0.65 | 0.13 |
| 1901 | Q777V | 777 | 0.46 | 0.72 | 0.67 | 0.62 | 0.11 |
| 1902 | F778Q | 778 | 0.87 | 0.47 | 1.08 | 0.81 | 0.25 |
| 1903 | F778K | 778 | 0.92 | 0.68 | 0.48 | 0.69 | 0.18 |
| 1904 | F778R | 778 | 0.46 | 0.61 | 0.43 | 0.5 | 0.08 |
| 1905 | F778G | 778 | 0.57 | 0.28 | 0.4 | 0.42 | 0.12 |
| 1906 | I783Q | 783 | 0.61 | 1.03 | 0.91 | 0.85 | 0.18 |
| 1907 | V784F | 784 | 1.03 | 1.39 | 1.33 | 1.25 | 0.16 |
| 1908 | V784L | 784 | 1.06 | 0.92 | 1.09 | 1.03 | 0.07 |
| 1909 | V784Y | 784 | 0.81 | 1.23 | 0.9 | 0.98 | 0.18 |
| 1910 | V784R | 784 | 0.73 | 0.93 | 0.99 | 0.88 | 0.11 |
| 1911 | V784W | 784 | 0.47 | 0.74 | 1.04 | 0.75 | 0.23 |
| 1912 | V784H | 784 | −0.58 | 0.89 | 1.33 | 0.55 | 0.82 |
| 1913 | V784I | 784 | 0.6 | 0.42 | 0.43 | 0.48 | 0.08 |
| 1914 | N787A | 787 | 3.01 | 3.25 | 3.28 | 3.18 | 0.12 |
| 1915 | N787W | 787 | 2.32 | 2.6 | 2.15 | 2.36 | 0.19 |
| 1916 | N787G | 787 | 2.43 | 2.15 | 1.9 | 2.16 | 0.22 |
| 1917 | N787Q | 787 | 2.07 | 2.4 | 1.56 | 2.01 | 0.35 |
| 1918 | N787P | 787 | 1.92 | 1.98 | 1.98 | 1.96 | 0.03 |
| 1919 | N787R | 787 | 1.92 | 1.65 | 1.92 | 1.83 | 0.13 |
| 1920 | N787S | 787 | 1.73 | 1.74 | 1.95 | 1.81 | 0.1 |
| 1921 | N787C | 787 | 2.07 | 0.9 | 1.56 | 1.51 | 0.48 |
| 1922 | N787M | 787 | 1.28 | 1.36 | 1.53 | 1.39 | 0.1 |
| 1923 | N787H | 787 | 0.68 | 1.46 | 1.05 | 1.06 | 0.32 |
| 1924 | N787F | 787 | 0.76 | 0.84 | 0.97 | 0.86 | 0.09 |
| 1925 | I788Y | 788 | 0.53 | 0.79 | 1.15 | 0.82 | 0.25 |
| 1926 | I788F | 788 | 0.57 | 0.49 | 0.7 | 0.59 | 0.09 |
| 1927 | P789C | 789 | −0.97 | 1.51 | 0.8 | 0.44 | 1.04 |
| 1928 | E790I | 790 | 1.92 | 2.22 | 2.26 | 2.13 | 0.15 |
| 1929 | E790P | 790 | 1.59 | 1.82 | 2.22 | 1.88 | 0.26 |
| 1930 | E790F | 790 | 1.74 | 1.59 | 1.75 | 1.69 | 0.07 |
| 1931 | E790V | 790 | 1.82 | 1.64 | 1.45 | 1.64 | 0.15 |
| 1932 | E790R | 790 | 1.25 | 1.64 | 1.79 | 1.56 | 0.23 |
| 1933 | E790K | 790 | 1.47 | 1.59 | 1.51 | 1.52 | 0.05 |
| 1934 | E790A | 790 | 1.43 | 1.38 | 1.75 | 1.52 | 0.16 |
| 1935 | E790T | 790 | 1.71 | 0.9 | 1.82 | 1.47 | 0.41 |
| 1936 | E790N | 790 | 1.71 | 1.48 | 1.05 | 1.41 | 0.27 |
| 1937 | E790S | 790 | 1.64 | 1.11 | 1.05 | 1.27 | 0.26 |
| 1938 | E790Q | 790 | 0.96 | 1.57 | 1.08 | 1.2 | 0.26 |
| 1939 | E790W | 790 | 1.08 | 1.43 | 0.83 | 1.11 | 0.25 |
| 1940 | E790M | 790 | 1.38 | 1.02 | 0.92 | 1.11 | 0.2 |
| 1941 | E790C | 790 | 1.51 | 1.82 | −0.05 | 1.09 | 0.82 |
| 1942 | E790G | 790 | 1.07 | 0.97 | 0.9 | 0.98 | 0.07 |
| 1943 | E790Y | 790 | 1.13 | 0.79 | 0.68 | 0.87 | 0.19 |
| 1944 | E790H | 790 | 1.08 | 0.74 | 0.22 | 0.68 | 0.36 |
| 1945 | N791G | 791 | 2.07 | 0.2 | 0.65 | 0.97 | 0.8 |
| 1946 | N791E | 791 | 0.29 | 0.85 | 0.6 | 0.58 | 0.23 |
| 1947 | N791F | 791 | 0.57 | 0.65 | 0.4 | 0.54 | 0.1 |
| 1948 | Y793V | 793 | 1.31 | 0.7 | 1.27 | 1.09 | 0.28 |
| 1949 | Y793R | 793 | 0.7 | 0.95 | 0.59 | 0.75 | 0.15 |
| 1950 | Y793W | 793 | 0.31 | 0.79 | 0.83 | 0.64 | 0.24 |
| 1951 | Y793Q | 793 | 0.82 | 0.49 | 0.36 | 0.56 | 0.19 |
| 1952 | Q794P | 794 | 1 | 1.43 | 0.14 | 0.86 | 0.54 |
| 1953 | Q794L | 794 | 0.5 | 0.94 | 0.53 | 0.66 | 0.2 |
| 1954 | Y797W | 797 | 0.64 | 1.05 | −0.22 | 0.49 | 0.53 |
| 1955 | K798L | 798 | 1.17 | 0.46 | 0.78 | 0.8 | 0.29 |
| 1956 | F800W | 800 | 0.82 | 1.31 | 0.94 | 1.02 | 0.21 |
| 1957 | N801A | 801 | 0.82 | 0.9 | 1.35 | 1.02 | 0.23 |
| 1958 | N801S | 801 | 0.13 | −0.48 | 1.66 | 0.44 | 0.9 |
| 1959 | K803A | 803 | 1.23 | 1.6 | 0.65 | 1.16 | 0.39 |
| 1960 | S804F | 804 | 1.23 | 0.91 | 0.88 | 1 | 0.16 |
| 1961 | S804I | 804 | 0.42 | 1.51 | −0.04 | 0.63 | 0.65 |
| 1962 | K806C | 806 | 0.2 | 0.75 | 0.54 | 0.5 | 0.23 |
| 1963 | S809G | 809 | 0.59 | 0.27 | 0.62 | 0.49 | 0.16 |
| 1964 | A813H | 813 | 0.78 | 1.11 | 0.24 | 0.71 | 0.36 |
| 1965 | E823P | 823 | 1.14 | 0.88 | 0.84 | 0.96 | 0.13 |
| 1966 | E823A | 823 | 0.67 | 0.5 | 0.69 | 0.62 | 0.09 |
| 1967 | E823S | 823 | 0.19 | 0.88 | 0.19 | 0.42 | 0.33 |
| 1968 | A825H | 825 | 1.51 | 1.71 | 1.82 | 1.68 | 0.13 |
| 1969 | A825R | 825 | 1.11 | 1.34 | 1.4 | 1.28 | 0.12 |
| 1970 | A825K | 825 | 0.38 | 0.53 | 0.45 | 0.45 | 0.06 |
| 1971 | T826F | 826 | 3.15 | 3.35 | 3.35 | 3.28 | 0.1 |
| 1972 | T826Y | 826 | 3.03 | 3.3 | 3.28 | 3.2 | 0.12 |
| 1973 | T826W | 826 | 2.55 | 2.75 | 2.62 | 2.64 | 0.08 |
| 1974 | T826H | 826 | 1.94 | 2 | 2.23 | 2.06 | 0.12 |
| 1975 | T826C | 826 | 1.73 | 1.79 | 1.96 | 1.83 | 0.1 |
| 1976 | T826I | 826 | 1.56 | 1.77 | 1.89 | 1.74 | 0.13 |
| 1977 | T826M | 826 | 1.45 | 1.67 | 1.7 | 1.61 | 0.11 |
| 1978 | T826L | 826 | 1.1 | 1.3 | 1.4 | 1.27 | 0.12 |
| 1979 | T826K | 826 | 1.15 | 1.29 | 1.27 | 1.23 | 0.06 |
| 1980 | T826R | 826 | 1.07 | 1.13 | 1.24 | 1.15 | 0.07 |
| 1981 | T826Q | 826 | 0.89 | 0.72 | 0.8 | 0.8 | 0.07 |
| 1982 | T826N | 826 | 0.29 | 0.48 | 0.5 | 0.42 | 0.09 |
| 1983 | N827D | 827 | 0.95 | 0.69 | 0.72 | 0.79 | 0.12 |
| 1984 | N827E | 827 | 0.58 | 0.84 | 0.77 | 0.73 | 0.11 |
| 1985 | V829T | 829 | 1.87 | 1.96 | 1.9 | 1.91 | 0.04 |
| 1986 | D831L | 831 | 2.04 | 2.27 | 2.27 | 2.19 | 0.11 |
| 1987 | D831M | 831 | 0.83 | 0.75 | 0.97 | 0.85 | 0.09 |
| 1988 | D831Q | 831 | 1.12 | 0.84 | 0.39 | 0.78 | 0.3 |
| 1989 | D831R | 831 | 0.83 | 1.17 | −0.13 | 0.63 | 0.55 |
| 1990 | D831N | 831 | 0.83 | 0.7 | 0.1 | 0.54 | 0.32 |
| 1991 | Y832R | 832 | 3.17 | 3.35 | 3.45 | 3.32 | 0.12 |
| 1992 | Y832K | 832 | 2.7 | 2.97 | 3.04 | 2.9 | 0.15 |
| 1993 | Y832G | 832 | 2.08 | 2.22 | 2.29 | 2.2 | 0.09 |
| 1994 | Y832Q | 832 | 1.46 | 1.52 | 1.59 | 1.53 | 0.05 |
| 1995 | Y832A | 832 | 1.01 | 1.2 | 1.15 | 1.12 | 0.08 |
| 1996 | Y832N | 832 | 0.96 | 1.12 | 1.06 | 1.04 | 0.07 |
| 1997 | Y832M | 832 | 0.68 | 0.81 | 0.89 | 0.79 | 0.09 |
| 1998 | Y832E | 832 | 0.5 | 0.63 | 0.68 | 0.6 | 0.08 |
| 1999 | Y836K | 836 | 3.67 | 3.99 | 4.02 | 3.89 | 0.16 |
| 2000 | Y836Q | 836 | 3.61 | 3.78 | 3.87 | 3.75 | 0.1 |
| 2001 | Y836R | 836 | 3.11 | 3.28 | 3.31 | 3.23 | 0.09 |
| 2002 | Y836I | 836 | 3.21 | 2.99 | 3.08 | 3.09 | 0.09 |
| 2003 | Y836D | 836 | 2.87 | 2.91 | 3.25 | 3.01 | 0.17 |
| 2004 | Y836V | 836 | 2.83 | 3.07 | 3.08 | 3 | 0.12 |
| 2005 | Y836T | 836 | 2.81 | 3.05 | 2.89 | 2.92 | 0.1 |
| 2006 | Y836N | 836 | 2.71 | 2.95 | 3.04 | 2.9 | 0.14 |
| 2007 | Y836E | 836 | 2.67 | 3.07 | 2.76 | 2.84 | 0.17 |
| 2008 | Y836H | 836 | 2.89 | 2.92 | 2.68 | 2.83 | 0.1 |
| 2009 | Y836L | 836 | 2.48 | 2.69 | 2.81 | 2.66 | 0.14 |
| 2010 | Y836M | 836 | 2.61 | 2.72 | 2.65 | 2.66 | 0.05 |
| 2011 | Y836A | 836 | 2.7 | 2.43 | 2.57 | 2.57 | 0.11 |
| 2012 | Y836S | 836 | 2.09 | 2.37 | 2.37 | 2.28 | 0.13 |
| 2013 | Y836G | 836 | 1.93 | 1.69 | 1.94 | 1.85 | 0.12 |
| 2014 | Y836C | 836 | 0.84 | 0.93 | 0.83 | 0.86 | 0.04 |
| 2015 | D837P | 837 | 2.8 | 2.8 | 2.83 | 2.81 | 0.02 |
| 2016 | Y839L | 839 | 2.9 | 3.07 | 3.09 | 3.02 | 0.08 |
| 2017 | Y839H | 839 | 2.72 | 2.39 | 2.54 | 2.55 | 0.14 |
| 2018 | Y839I | 839 | 2.47 | 2.31 | 2.69 | 2.49 | 0.15 |
| 2019 | Y839T | 839 | 2.38 | 2.25 | 2.51 | 2.38 | 0.11 |
| 2020 | Y839Q | 839 | 2.34 | 2.25 | 2.46 | 2.35 | 0.09 |
| 2021 | Y839V | 839 | 2.1 | 2.35 | 2.31 | 2.25 | 0.11 |
| 2022 | Y839M | 839 | 2.11 | 2.12 | 2.31 | 2.18 | 0.09 |
| 2023 | Y839K | 839 | 2.16 | 2.04 | 2.23 | 2.15 | 0.08 |
| 2024 | Y839C | 839 | 1.75 | 2.16 | 2.02 | 1.98 | 0.17 |
| 2025 | Y839R | 839 | 2.1 | 1.79 | 1.93 | 1.94 | 0.13 |
| 2026 | Y839N | 839 | 1.81 | 1.83 | 2.07 | 1.91 | 0.12 |
| 2027 | Y839A | 839 | 0.73 | 0.93 | 1.42 | 1.03 | 0.29 |
| 2028 | Y839S | 839 | 0.58 | 0.82 | 0.72 | 0.71 | 0.1 |
| 2029 | L841I | 841 | 1.5 | 1.85 | 1.53 | 1.63 | 0.15 |
| 2030 | L841V | 841 | 0.91 | 0.89 | 1 | 0.94 | 0.05 |
| 2031 | L841C | 84 | 0.78 | 0.87 | 1.09 | 0.91 | 0.13 |
| 2032 | L841G | 841 | 0.5 | 1 | 0.75 | 0.75 | 0.2 |
| 2033 | L841Y | 841 | 0.47 | 0.53 | 0.62 | 0.54 | 0.06 |
| 2034 | M843F | 843 | 1.65 | 1.94 | 2.27 | 1.95 | 0.25 |
| 2035 | M843Q | 843 | 1.56 | 1.34 | 1.64 | 1.51 | 0.13 |
| 2036 | P844C | 844 | 0.14 | 0.93 | 1.37 | 0.82 | 0.51 |
| 2037 | I845Q | 845 | 1.75 | 0.24 | −0.01 | 0.66 | 0.78 |
| 2038 | T846G | 846 | 1.53 | 1.34 | 1.69 | 1.52 | 0.15 |
| 2039 | T846Q | 846 | 1.4 | 0.93 | 1.6 | 1.31 | 0.28 |
| 2040 | T846Y | 846 | 0.84 | 0.71 | 0.32 | 0.62 | 0.22 |
| 2041 | T846L | 846 | 0.59 | 0.63 | 0.44 | 0.55 | 0.08 |
| 2042 | T846W | 846 | 0.5 | 0.69 | 0.12 | 0.44 | 0.24 |
| 2043 | N848D | 848 | 1.06 | 0.93 | 0.91 | 0.97 | 0.07 |
| 2044 | F849R | 849 | 0.41 | 0.71 | 1.02 | 0.71 | 0.25 |
| 2045 | A851T | 851 | 1.06 | 0.5 | 0.68 | 0.75 | 0.23 |
| 2046 | A851N | 851 | 0.14 | 0.93 | 0.68 | 0.59 | 0.33 |
| 2047 | I857A | 857 | 0.66 | 0.24 | 0.5 | 0.46 | 0.17 |
| 2048 | I857N | 857 | 0.14 | 0.75 | 0.5 | 0.46 | 0.25 |
| 2049 | D859P | 859 | 0.43 | 1.22 | 1.38 | 1.01 | 0.41 |
| 2050 | R860E | 860 | 0.15 | 0.46 | 1.44 | 0.68 | 0.55 |
| 2051 | R860K | 860 | 0.84 | 0.73 | 0.21 | 0.59 | 0.27 |
| 2052 | I861A | 861 | 0.44 | 0.49 | 0.56 | 0.5 | 0.05 |
| 2053 | L862Y | 862 | 1.37 | 1.72 | 1.08 | 1.39 | 0.26 |
| 2054 | L862D | 862 | 0.7 | 0.46 | 0.9 | 0.69 | 0.18 |
| 2055 | L862H | 862 | 0.8 | 0.69 | 0.12 | 0.53 | 0.3 |
| 2056 | A866D | 866 | 1.44 | 0.93 | 1.37 | 1.25 | 0.23 |
| 2057 | A866Y | 866 | 0.6 | 0.39 | 0.63 | 0.54 | 0.11 |
| 2058 | K869C | 869 | 0.54 | 0.79 | 0.79 | 0.71 | 0.12 |
| 2059 | H872S | 872 | 1.05 | 0.3 | 0.2 | 0.51 | 0.38 |
| 2060 | H872M | 872 | 0.91 | 0.52 | −0.02 | 0.47 | 0.38 |
| 2061 | I876L | 876 | 0.71 | 0.67 | 0.63 | 0.67 | 0.03 |
| 2062 | V886S | 886 | 0.88 | 0.97 | 0.89 | 0.91 | 0.04 |
| 2063 | V886A | 886 | 0.57 | 0.58 | 0.56 | 0.57 | 0.01 |
| 2064 | V886G | 886 | 0.56 | 0.63 | 0.48 | 0.56 | 0.06 |
| 2065 | T891I | 891 | 0.31 | 0.82 | 0.4 | 0.51 | 0.22 |
| 2066 | C892T | 892 | 1.35 | 1.22 | 1.45 | 1.34 | 0.09 |
| 2067 | C892I | 892 | 1.06 | 0.93 | 0.54 | 0.85 | 0.22 |
| 2068 | C892D | 892 | 0.84 | 2.19 | −0.71 | 0.77 | 1.18 |
| 2069 | C892H | 892 | 0.15 | 1.09 | 0.83 | 0.69 | 0.4 |
| 2070 | G893K | 893 | 0.99 | 0.24 | 0.27 | 0.5 | 0.35 |
| 2071 | N894V | 894 | 0.42 | 1.06 | 0.91 | 0.8 | 0.28 |
| 2072 | E897Y | 897 | 0.53 | 0.48 | 1 | 0.67 | 0.23 |
| 2073 | Q898G | 898 | 0.84 | 0.93 | −0.02 | 0.58 | 0.43 |
| 2074 | F901M | 901 | 2.43 | 2.67 | 2.59 | 2.56 | 0.1 |
| 2075 | F901Q | 901 | 2.09 | 2.12 | 1.9 | 2.04 | 0.1 |
| 2076 | F901L | 901 | 0.61 | 0.71 | 0.75 | 0.69 | 0.06 |
| 2077 | F901G | 901 | 0.48 | 0.82 | 0.62 | 0.64 | 0.14 |
| 2078 | I903V | 903 | 0.36 | 0.43 | 0.47 | 0.42 | 0.05 |
| 2079 | Y907I | 907 | 3.11 | 3.15 | 3.13 | 3.13 | 0.02 |
| 2080 | Y907T | 907 | 1.74 | 1.42 | 1.12 | 1.43 | 0.25 |
| 2081 | Y907M | 907 | 0.84 | 1.1 | 1.8 | 1.25 | 0.41 |
| 2082 | Y907V | 907 | 0.9 | 0.8 | 1.15 | 0.95 | 0.15 |
| 2083 | Y909F | 909 | 1.11 | 1.01 | 1.31 | 1.14 | 0.12 |
| 2084 | Y909W | 909 | 1.02 | 1 | 1.13 | 1.05 | 0.06 |
| 2085 | Q910A | 910 | 0.83 | 0.46 | 1.35 | 0.88 | 0.37 |
| 2086 | Q910N | 910 | 1.24 | 0.57 | 0.56 | 0.79 | 0.32 |
| 2087 | Q910Y | 910 | 0.93 | 0.77 | 0.06 | 0.59 | 0.38 |
| 2088 | Q910S | 910 | 0.65 | 0.84 | 0.12 | 0.54 | 0.3 |
| 2089 | I911Q | 911 | 1.29 | 1.66 | 1.54 | 1.5 | 0.15 |
| 2090 | I911E | 911 | 1.41 | 1.31 | 1.59 | 1.44 | 0.12 |
| 2091 | I911A | 911 | 1.24 | 1.25 | 1.32 | 1.27 | 0.03 |
| 2092 | I911H | 911 | 0.95 | 0.95 | 0.83 | 0.91 | 0.06 |
| 2093 | I911D | 911 | 0.53 | 0.9 | 1 | 0.81 | 0.2 |
| 2094 | I911Y | 911 | 0.7 | 0.89 | 0.59 | 0.73 | 0.12 |
| 2095 | I911G | 911 | 0.65 | 0.49 | 0.54 | 0.56 | 0.07 |
| 2096 | I911W | 911 | 0.5 | 0.4 | 0.66 | 0.52 | 0.11 |
| 2097 | K912H | 912 | 1.08 | 0.93 | 0.69 | 0.9 | 0.16 |
| 2098 | K912Y | 912 | 0.79 | 0.95 | 0.51 | 0.75 | 0.18 |
| 2099 | K912C | 912 | 1.03 | −0.73 | 1.04 | 0.45 | 0.83 |
| 2100 | K914A | 914 | 1.64 | 1.3 | 1.54 | 1.49 | 0.14 |
| 2101 | K914S | 914 | 1.11 | 0.97 | 1.01 | 1.03 | 0.06 |
| 2102 | K914Q | 914 | 0.75 | 0.88 | 0.97 | 0.86 | 0.09 |
| 2103 | K914F | 914 | 0.89 | 0.73 | 0.87 | 0.83 | 0.07 |
| 2104 | K914T | 914 | 0.74 | 0.65 | 0.63 | 0.67 | 0.05 |
| 2105 | K914M | 914 | 0.7 | 0.54 | 0.68 | 0.64 | 0.07 |
| 2106 | K914C | 914 | 0.68 | 0.39 | 0.64 | 0.57 | 0.13 |
| 2107 | Q916Y | 916 | 1.04 | 1.29 | 1.02 | 1.12 | 0.12 |
| 2108 | Q916M | 916 | 0.77 | 1.08 | 1.16 | 1 | 0.17 |
| 2109 | Q916D | 916 | 1.06 | 0.5 | 1.13 | 0.89 | 0.28 |
| 2110 | Q916V | 916 | 0.82 | 0.62 | 1.05 | 0.83 | 0.18 |
| 2111 | Q916L | 916 | 0.62 | 0.79 | 0.7 | 0.7 | 0.07 |
| 2112 | Q916A | 916 | 0.65 | 0.85 | 0.6 | 0.7 | 0.11 |
| 2113 | Q916N | 916 | 0.87 | 0.15 | 0.73 | 0.59 | 0.31 |
| 2114 | Q916W | 916 | 0.45 | 0.76 | 0.51 | 0.58 | 0.14 |
| 2115 | G918E | 918 | 1.98 | 1.96 | 2.03 | 1.99 | 0.03 |
| 2116 | G918M | 918 | 1.82 | 1.68 | 1.66 | 1.72 | 0.07 |
| 2117 | G918Q | 918 | 1.29 | 1.44 | 1.38 | 1.37 | 0.06 |
| 2118 | G918L | 918 | 1.08 | 1.32 | 1.45 | 1.28 | 0.15 |
| 2119 | G918I | 918 | 1.16 | 1.37 | 1.3 | 1.28 | 0.09 |
| 2120 | G918T | 918 | 0.76 | 0.89 | 0.89 | 0.85 | 0.06 |
| 2121 | G918Y | 918 | 0.58 | 0.91 | 0.62 | 0.71 | 0.14 |
| 2122 | G918F | 918 | 0.68 | 0.63 | 0.61 | 0.64 | 0.03 |
| 2123 | G918H | 918 | 0.4 | 0.92 | 0.6 | 0.64 | 0.21 |
| 2124 | G918K | 918 | 0.62 | 0.52 | 0.72 | 0.62 | 0.08 |
| 2125 | G918D | 918 | 0.48 | 0.42 | 0.48 | 0.46 | 0.03 |
| 2126 | A919I | 919 | 1.99 | 2.11 | 1.95 | 2.02 | 0.07 |
| 2127 | A919E | 919 | 1.36 | 0.59 | 1.19 | 1.05 | 0.33 |
| 2128 | A919F | 919 | 0.83 | 0.89 | 0.92 | 0.88 | 0.04 |
| 2129 | A919L | 919 | 0.84 | 0.78 | 0.83 | 0.82 | 0.03 |
| 2130 | A919Y | 919 | 0.28 | 1.14 | 0.76 | 0.73 | 0.35 |
| 2131 | A919M | 919 | 0.51 | 0.57 | 0.33 | 0.47 | 0.1 |
| 2132 | Q921A | 921 | 0.83 | 0.55 | 0.47 | 0.62 | 0.15 |
| 2133 | Q921T | 921 | 0.74 | 0.23 | 0.65 | 0.54 | 0.22 |
| 2134 | I922A | 922 | 0.71 | 0.55 | 0.76 | 0.67 | 0.09 |
| 2135 | I922R | 922 | 0.55 | 0.73 | 0.58 | 0.62 | 0.08 |
| 2136 | I922Y | 922 | 0.46 | 0.63 | 0.57 | 0.55 | 0.07 |
| 2137 | I922W | 922 | 0.38 | 0.68 | 0.49 | 0.51 | 0.13 |
| 2138 | I922C | 922 | 0.34 | 0.64 | 0.37 | 0.45 | 0.14 |
| 2139 | I922H | 922 | 0.39 | 0.47 | 0.44 | 0.43 | 0.03 |
| 2140 | K925C | 925 | 0.82 | 0.39 | 0.65 | 0.62 | 0.18 |
| 2141 | E926S | 926 | 1.06 | 1.15 | 1.18 | 1.13 | 0.05 |
| 2142 | E926T | 926 | 0.97 | 0.99 | 0.98 | 0.98 | 0.01 |
| 2143 | E926N | 926 | 0.44 | 0.48 | 0.36 | 0.43 | 0.05 |
| 2144 | K928W | 928 | 0.78 | 0.7 | 0.67 | 0.72 | 0.05 |
| 2145 | E929C | 929 | 1.05 | 0.92 | 1.21 | 1.06 | 0.12 |
| 2146 | E929G | 929 | 0.74 | 0.67 | 0.8 | 0.74 | 0.05 |
| 2147 | E929S | 929 | 0.42 | 0.52 | 0.61 | 0.52 | 0.07 |
| 2148 | E929P | 929 | 0.41 | 0.5 | 0.62 | 0.51 | 0.09 |
| 2149 | E929N | 929 | 0.57 | 0.31 | 0.61 | 0.5 | 0.13 |
| 2150 | G931Q | 931 | 0.54 | 0.64 | 0.98 | 0.72 | 0.19 |
| 2151 | G931H | 931 | 0.25 | 0.62 | 0.43 | 0.43 | 0.15 |
| 2152 | K934S | 934 | 0.64 | 0.38 | 0.6 | 0.54 | 0.12 |
| 2153 | E935R | 935 | 2.72 | 2.95 | 3.05 | 2.91 | 0.14 |
| 2154 | E935M | 935 | 2.9 | 2.77 | 2.97 | 2.88 | 0.08 |
| 2155 | E935N | 935 | 2.75 | 2.91 | 2.8 | 2.82 | 0.07 |
| 2156 | E935A | 935 | 2.43 | 2.62 | 2.7 | 2.58 | 0.11 |
| 2157 | E935Q | 935 | 2.21 | 2.5 | 2.62 | 2.44 | 0.17 |
| 2158 | E935K | 935 | 2.25 | 2.53 | 2.53 | 2.43 | 0.13 |
| 2159 | E935L | 935 | 1.91 | 2.07 | 2.1 | 2.03 | 0.08 |
| 2160 | E935S | 935 | 1.75 | 2.08 | 1.96 | 1.93 | 0.14 |
| 2161 | E935Y | 935 | 1.93 | 1.85 | 1.75 | 1.84 | 0.07 |
| 2162 | E935H | 935 | 1.73 | 2.03 | 1.76 | 1.84 | 0.14 |
| 2163 | E935C | 935 | 1.39 | 1.55 | 1.56 | 1.5 | 0.08 |
| 2164 | E935G | 935 | 1.1 | 1.58 | 1.35 | 1.34 | 0.2 |
| 2165 | E935F | 935 | 1.18 | 1.5 | 1.34 | 1.34 | 0.13 |
| 2166 | E935T | 935 | 1.2 | 1.36 | 1.46 | 1.34 | 0.11 |
| 2167 | E935W | 935 | 0.78 | 1.29 | 1.5 | 1.19 | 0.3 |
| 2168 | I936T | 936 | 2.76 | 2.88 | 2.96 | 2.86 | 0.08 |
| 2169 | I936C | 936 | 2.11 | 1.85 | 1.91 | 1.96 | 0.11 |
| 2170 | I936A | 936 | 1.94 | 1.92 | 1.99 | 1.95 | 0.03 |
| 2171 | I936R | 936 | 1.72 | 1.75 | 1.81 | 1.76 | 0.04 |
| 2172 | I936K | 936 | 1.57 | 1.63 | 1.66 | 1.62 | 0.03 |
| 2173 | I936S | 936 | 1.38 | 1.37 | 1.44 | 1.4 | 0.03 |
| 2174 | I936Q | 936 | 1.16 | 1.48 | 1.29 | 1.31 | 0.13 |
| 2175 | I936Y | 936 | 1.17 | 1.18 | 1.25 | 1.2 | 0.03 |
| 2176 | I936F | 936 | 0.99 | 0.83 | 0.99 | 0.94 | 0.08 |
| 2177 | I936L | 936 | 0.99 | 0.85 | 0.92 | 0.92 | 0.06 |
| 2178 | I936G | 936 | 0.59 | 0.11 | 0.56 | 0.42 | 0.22 |
| 2179 | L941C | 941 | 1.77 | 1.64 | 1.64 | 1.68 | 0.06 |
| 2180 | L941N | 941 | 1.06 | 0.63 | 0.65 | 0.78 | 0.2 |
| 2181 | S942A | 942 | 1.93 | 2.14 | 1.99 | 2.02 | 0.09 |
| 2182 | L943I | 943 | 1.24 | 2.17 | 1.9 | 1.77 | 0.39 |
| 2183 | V944C | 944 | 0.63 | 0.58 | 0.6 | 0.6 | 0.02 |
| 2184 | I945M | 945 | 0.99 | 1.24 | 1.18 | 1.14 | 0.11 |
| 2185 | H946W | 946 | 1.36 | 1.51 | 1.36 | 1.41 | 0.07 |
| 2186 | E947P | 947 | 1.57 | 1.71 | 1.88 | 1.72 | 0.13 |
| 2187 | E947F | 947 | 0.49 | 0.47 | 0.74 | 0.56 | 0.13 |
| 2188 | E947M | 947 | 0.35 | 0.35 | 0.65 | 0.45 | 0.14 |
| 2189 | I948L | 948 | 1.03 | 0.84 | 0.77 | 0.88 | 0.11 |
| 2190 | S949M | 949 | 1.72 | 1.74 | 1.84 | 1.77 | 0.05 |
| 2191 | S949V | 949 | 1.54 | 1.69 | 1.58 | 1.6 | 0.06 |
| 2192 | S949T | 949 | 1.08 | 1.32 | 1.28 | 1.23 | 0.11 |
| 2193 | S949Q | 949 | 1.43 | 1.02 | 1.12 | 1.19 | 0.18 |
| 2194 | S949I | 949 | 0.9 | 0.66 | 1.02 | 0.86 | 0.15 |
| 2195 | S949K | 949 | 0.47 | 0.34 | 0.65 | 0.49 | 0.12 |
| 2196 | M951G | 951 | −0.15 | 0.79 | 0.77 | 0.47 | 0.44 |
| 2197 | V952E | 952 | 0.79 | 0.38 | 0.73 | 0.63 | 0.18 |
| 2198 | V952W | 952 | 0.78 | 0.41 | 0.6 | 0.6 | 0.15 |
| 2199 | I953A | 953 | 0.62 | 0.47 | 0.82 | 0.63 | 0.14 |
| 2200 | I953P | 953 | 0.68 | 0.51 | 0.52 | 0.57 | 0.08 |
| 2201 | K954A | 954 | 0.7 | 1.33 | 1.71 | 1.25 | 0.42 |
| 2202 | K954P | 954 | 1.13 | 0.84 | 0.66 | 0.88 | 0.2 |
| 2203 | Y955W | 955 | 0.93 | 1.26 | 1.65 | 1.28 | 0.29 |
| 2204 | Y955C | 955 | −0.55 | 1.15 | 1.22 | 0.61 | 0.82 |
| 2205 | N956C | 956 | 2.28 | 1.48 | 1.22 | 1.66 | 0.45 |
| 2206 | N956W | 956 | 1.46 | 1.04 | 1.47 | 1.32 | 0.2 |
| 2207 | N956F | 956 | 1.06 | 1.3 | 0.92 | 1.09 | 0.16 |
| 2208 | N956Y | 956 | 0.87 | 0.72 | 0.63 | 0.74 | 0.1 |
| 2209 | A957P | 957 | 1.02 | 1.17 | 1.14 | 1.11 | 0.06 |
| 2210 | A957F | 957 | 1.53 | 0.52 | 0.81 | 0.95 | 0.42 |
| 2211 | A957T | 957 | 0.32 | 0.93 | 0.45 | 0.56 | 0.26 |
| 2212 | I958V | 958 | 0.83 | 0.71 | 0.4 | 0.65 | 0.18 |
| 2213 | I959F | 959 | 1.49 | 1.01 | 0.95 | 1.15 | 0.24 |
| 2214 | D963C | 963 | 1.39 | −0.46 | 0.37 | 0.44 | 0.76 |
| 2215 | F968W | 968 | 0.29 | 0.56 | 0.63 | 0.49 | 0.15 |
| 2216 | K970C | 970 | 0.43 | 0.68 | 0.26 | 0.46 | 0.17 |
| 2217 | K974G | 974 | 3.37 | 3.23 | 3.31 | 3.31 | 0.06 |
| 2218 | K974P | 974 | 2.45 | 2.32 | 2.38 | 2.38 | 0.06 |
| 2219 | K974W | 974 | 1.25 | 2.18 | 1.77 | 1.74 | 0.38 |
| 2220 | K974A | 974 | 1.12 | 1.29 | 1.62 | 1.34 | 0.21 |
| 2221 | K974T | 974 | 1.29 | 1.44 | 0.92 | 1.22 | 0.22 |
| 2222 | K974Q | 974 | 0.71 | 1.22 | 1.08 | 1 | 0.21 |
| 2223 | K974Y | 974 | 0.99 | 0.56 | 1.44 | 1 | 0.36 |
| 2224 | K974C | 974 | 1.16 | 0.46 | 1.23 | 0.95 | 0.35 |
| 2225 | K974S | 974 | 0.95 | 0.69 | 0.67 | 0.77 | 0.12 |
| 2226 | K974M | 974 | 0.5 | 0.99 | −0.08 | 0.47 | 0.44 |
| 2227 | K974E | 974 | 0.64 | −0.23 | 0.95 | 0.45 | 0.5 |
| 2228 | V975I | 975 | 0.66 | 0.6 | 0.69 | 0.65 | 0.04 |
| 2229 | R977H | 977 | 0.59 | 0.54 | 0.28 | 0.47 | 0.14 |
| 2230 | K982Y | 982 | 0.78 | 1.03 | 0.37 | 0.73 | 0.27 |
| 2231 | K982S | 982 | 0.56 | 0.69 | 0.75 | 0.67 | 0.08 |
| 2232 | F983A | 983 | 0.76 | 0.4 | 0.71 | 0.62 | 0.16 |
| 2233 | M986G | 986 | 0.51 | 0.56 | 0.22 | 0.43 | 0.15 |
| 2234 | I988K | 988 | 1.54 | 1.35 | 1.94 | 1.61 | 0.25 |
| 2235 | I988E | 988 | 0.85 | 1.63 | 0.68 | 1.06 | 0.41 |
| 2236 | L991W | 991 | 1.25 | 1.34 | 1.93 | 1.51 | 0.3 |
| 2237 | L991C | 991 | 1.54 | 0.93 | 1.37 | 1.28 | 0.26 |
| 2238 | N992L | 992 | 1.41 | 0.93 | −0.02 | 0.78 | 0.59 |
| 2239 | N992A | 992 | 1.25 | 0.24 | −0.02 | 0.49 | 0.55 |
| 2240 | L994A | 994 | 1.77 | 1.63 | −0.01 | 1.13 | 0.81 |
| 2241 | V995P | 995 | 0.85 | 0.65 | 0.39 | 0.63 | 0.19 |
| 2242 | F996T | 996 | 0.85 | 0.24 | 0.68 | 0.59 | 0.26 |
| 2243 | F996V | 996 | 0.85 | 0.93 | −0.01 | 0.59 | 0.43 |
| 2244 | D998T | 998 | 1.91 | 1.74 | 1.6 | 1.75 | 0.13 |
| 2245 | D998W | 998 | 0.49 | 0.02 | 0.86 | 0.46 | 0.35 |
| 2246 | I999P | 999 | 0.85 | 2.19 | 1.59 | 1.54 | 0.55 |
| 2247 | I999H | 999 | 0.16 | 0.65 | 1.08 | 0.63 | 0.38 |
| 2248 | I1001W | 1001 | 0.85 | 0.24 | 0.68 | 0.59 | 0.26 |
| 2249 | T1002V | 1002 | 1.26 | 0.94 | −0.02 | 0.73 | 0.54 |
| 2250 | T1002C | 1002 | 1.07 | −0.45 | 0.9 | 0.51 | 0.68 |
| 2251 | T1002L | 1002 | 0.35 | 0.44 | 0.71 | 0.5 | 0.15 |
| 2252 | T1002S | 1002 | 0.74 | 0.25 | 0.39 | 0.46 | 0.21 |
| 2253 | E1003S | 1003 | 1.62 | 1.09 | 0.97 | 1.23 | 0.29 |
| 2254 | E1003M | 1003 | 0.16 | 0.58 | 1.21 | 0.65 | 0.43 |
| 2255 | N1004A | 1004 | 2.17 | 1.85 | −0.71 | 1.11 | 1.29 |
| 2256 | N1004G | 1004 | 0.85 | 0.65 | 1.08 | 0.86 | 0.18 |
| 2257 | N1004R | 1004 | 0.67 | 0.85 | 0.44 | 0.65 | 0.17 |
| 2258 | N1004P | 1004 | 0.63 | −0.27 | 1.21 | 0.52 | 0.61 |
| 2259 | N1004Q | 1004 | 0.34 | 0.94 | 0.17 | 0.48 | 0.33 |
| 2260 | L1007V | 1007 | 0.5 | 0.72 | 0.48 | 0.57 | 0.11 |
| 2261 | L1007C | 1007 | 0.38 | 0.69 | 0.5 | 0.53 | 0.13 |
| 2262 | L1007A | 1007 | 0.41 | 0.65 | 0.39 | 0.49 | 0.12 |
| 2263 | L1008F | 1008 | 0.86 | 0.47 | 1.08 | 0.81 | 0.25 |
| 2264 | Y1011V | 1011 | 0.64 | 1.12 | 1.21 | 0.99 | 0.25 |
| 2265 | Y1011L | 1011 | 0.84 | 0.94 | 0.63 | 0.8 | 0.13 |
| 2266 | Y1011I | 1011 | 0.3 | 1.01 | 0.81 | 0.71 | 0.3 |
| 2267 | T1014C | 1014 | 0.54 | 1.15 | 0.77 | 0.82 | 0.25 |
| 2268 | Y1015M | 1015 | 1.1 | 1.28 | 1.29 | 1.22 | 0.09 |
| 2269 | Y1015A | 1015 | 0.9 | 1.19 | 1.14 | 1.08 | 0.13 |
| 2270 | Y1015E | 1015 | 0.99 | 0.82 | 1.06 | 0.96 | 0.1 |
| 2271 | Y1015Q | 1015 | 0.63 | 0.97 | 0.98 | 0.86 | 0.16 |
| 2272 | Y1015G | 1015 | 0.7 | 0.66 | 0.56 | 0.64 | 0.06 |
| 2273 | Y1015T | 1015 | 0.45 | 0.5 | 0.45 | 0.47 | 0.02 |
| 2274 | I1016E | 1016 | 0.96 | 0.94 | 0.92 | 0.94 | 0.02 |
| 2275 | I1016N | 1016 | 1.09 | 0.8 | 0.71 | 0.87 | 0.16 |
| 2276 | I1016A | 1016 | 0.51 | 0.74 | 0.78 | 0.67 | 0.12 |
| 2277 | I1016P | 1016 | 0.43 | 0.56 | 0.5 | 0.5 | 0.05 |
| 2278 | P1017W | 1017 | 1.42 | 0.66 | 0.79 | 0.95 | 0.33 |
| 2279 | P1017G | 1017 | 0.92 | 1.35 | 0.46 | 0.91 | 0.36 |
| 2280 | P1017N | 1017 | 1.16 | 1.25 | 0.23 | 0.88 | 0.46 |
| 2281 | P1017E | 1017 | 1.37 | 0.4 | 0.27 | 0.68 | 0.49 |
| 2282 | P1017D | 1017 | 0.3 | 0.7 | 0.86 | 0.62 | 0.24 |
| 2283 | P1017Q | 1017 | 0.91 | 0.35 | 0.44 | 0.56 | 0.25 |
| 2284 | K1019A | 1019 | 0.86 | 0.92 | 1.06 | 0.95 | 0.09 |
| 2285 | K1019G | 1019 | 0.87 | 0.4 | 0.8 | 0.69 | 0.21 |
| 2286 | K1019V | 1019 | 0.56 | 0.62 | 0.5 | 0.56 | 0.05 |
| 2287 | K1019S | 1019 | 0.45 | 0.51 | 0.62 | 0.53 | 0.07 |
| 2288 | K1019C | 1019 | 0.17 | 0.86 | 0.23 | 0.42 | 0.31 |
| 2289 | K1021A | 1021 | 1.26 | 1.2 | 1.01 | 1.16 | 0.11 |
| 2290 | K1021V | 1021 | 0.86 | 1.11 | 0.67 | 0.88 | 0.18 |
| 2291 | K1021F | 1021 | 0.42 | 0.78 | 0.43 | 0.54 | 0.17 |
| 2292 | K1021W | 1021 | 0.68 | 0.06 | 0.75 | 0.5 | 0.31 |
| 2293 | V1023N | 1023 | 1.01 | 0.76 | 0.49 | 0.75 | 0.22 |
| 2294 | V1023C | 1023 | 0.33 | 0.8 | 0.57 | 0.57 | 0.19 |
| 2295 | G1024Y | 1024 | 0.2 | 0.7 | 0.67 | 0.52 | 0.23 |
| 2296 | Q1026M | 1026 | 1.26 | 0.9 | 1.19 | 1.12 | 0.16 |
| 2297 | Q1026N | 1026 | 0.86 | 0.65 | 0.81 | 0.77 | 0.09 |
| 2298 | C1027N | 1027 | 0.58 | 0.64 | 0.65 | 0.62 | 0.03 |
| 2299 | C1029N | 1029 | 0.4 | 0.54 | 0.6 | 0.51 | 0.09 |
| 2300 | Y1032Q | 1032 | 0.84 | 0.84 | 0.73 | 0.8 | 0.05 |
| 2301 | Y1032R | 1032 | 0.86 | 0.72 | 0.7 | 0.76 | 0.07 |
| 2302 | Y1032K | 1032 | 0.83 | 0.6 | 0.82 | 0.75 | 0.11 |
| 2303 | Y1032W | 1032 | 0.64 | 0.14 | 0.67 | 0.49 | 0.24 |
| 2304 | A1036H | 1036 | 0.93 | 0.65 | 0.55 | 0.71 | 0.16 |
| 2305 | A1036F | 1036 | 0.79 | 0.71 | 0.52 | 0.67 | 0.11 |
| 2306 | K1040A | 1040 | 2.24 | 0.93 | 2.37 | 1.85 | 0.65 |
| 2307 | K1040T | 1040 | 1.01 | 1.91 | −0.44 | 0.83 | 0.97 |
| 2308 | K1040I | 1040 | 1.26 | 0.23 | 0.66 | 0.72 | 0.42 |
| 2309 | I1050D | 1050 | 1.08 | 0.98 | 1.06 | 1.04 | 0.04 |
| 2310 | I1050W | 1050 | 0.65 | 0.69 | 0.54 | 0.63 | 0.06 |
| 2311 | I1050H | 1050 | 0.5 | 0.87 | 0.31 | 0.56 | 0.23 |
| 2312 | K1052W | 1052 | 0.76 | 1.25 | 0.94 | 0.98 | 0.2 |
| 2313 | K1052C | 1052 | 0.45 | 0.7 | 1.08 | 0.74 | 0.26 |
| 2314 | K1052G | 1052 | 0.44 | 0.27 | 0.56 | 0.42 | 0.12 |
| 2315 | K1052I | 1052 | 0.01 | 0.55 | 0.71 | 0.42 | 0.3 |
| 2316 | F1053Y | 1053 | −0.04 | 1.45 | −0.02 | 0.46 | 0.7 |
| 2317 | K1054L | 1054 | 1.1 | 1.21 | 1.17 | 1.16 | 0.05 |
| 2318 | K1054I | 1054 | 1.1 | 1.12 | 1 | 1.07 | 0.05 |
| 2319 | K1054W | 1054 | 0.73 | 1.15 | 0.76 | 0.88 | 0.19 |
| 2320 | K1054V | 1054 | 0.88 | 0.72 | 0.97 | 0.86 | 0.1 |
| 2321 | K1054F | 1054 | 0.94 | 0.52 | 0.73 | 0.73 | 0.17 |
| 2322 | K1054M | 1054 | 0.62 | 0.53 | 0.58 | 0.58 | 0.04 |
| 2323 | D1055I | 1055 | 1.78 | 1.49 | 1.85 | 1.71 | 0.15 |
| 2324 | D1055M | 1055 | 1.4 | 1.39 | 1.08 | 1.29 | 0.15 |
| 2325 | D1055F | 1055 | 0.93 | 1.63 | 1.21 | 1.26 | 0.29 |
| 2326 | D1055T | 1055 | 0.96 | 1.07 | 0.89 | 0.97 | 0.07 |
| 2327 | D1055P | 1055 | 0.57 | 1.22 | 0.99 | 0.93 | 0.27 |
| 2328 | D1055C | 1055 | 0.66 | 0.73 | 0.88 | 0.76 | 0.09 |
| 2329 | D1055L | 1055 | 0.3 | 0.86 | 0.98 | 0.71 | 0.3 |
| 2330 | D1055V | 1055 | 0.41 | 0.62 | 0.46 | 0.5 | 0.09 |
| 2331 | D1055Q | 1055 | 0.27 | 0.53 | 0.51 | 0.44 | 0.12 |
| 2332 | L1056E | 1056 | 0.86 | 0.94 | 0.9 | 0.9 | 0.03 |
| 2333 | L1056C | 1056 | 0.17 | 0.43 | 0.94 | 0.51 | 0.32 |
| 2334 | L1056I | 1056 | 0.24 | 0.5 | 0.78 | 0.5 | 0.22 |
| 2335 | T1057Y | 1057 | 0.57 | 0.65 | 0.67 | 0.63 | 0.04 |
| 2336 | V1058W | 1058 | 1.96 | 1.35 | 1.37 | 1.56 | 0.28 |
| 2337 | V1058H | 1058 | 0.62 | 0.25 | 0.92 | 0.6 | 0.28 |
| 2338 | A1060N | 1060 | 1.71 | 1.35 | 0.27 | 1.11 | 0.61 |
| 2339 | A1060Q | 1060 | 0.86 | 0.54 | 0.27 | 0.56 | 0.24 |
| 2340 | K1061W | 1061 | 1.96 | 2.04 | 2.28 | 2.1 | 0.14 |
| 2341 | K1061F | 1061 | 1.78 | 1.35 | 1.08 | 1.4 | 0.29 |
| 2342 | K1061D | 1061 | 0.86 | 0.76 | 1.08 | 0.9 | 0.13 |
| 2343 | K1061E | 1061 | 0.78 | 0.76 | 1.13 | 0.89 | 0.17 |
| 2344 | K1061C | 1061 | 1.09 | 1.17 | 0.39 | 0.88 | 0.35 |
| 2345 | K1061S | 1061 | 0.46 | 0.94 | 1.13 | 0.84 | 0.28 |
| 2346 | K1061L | 1061 | 0.57 | 0.61 | 0.52 | 0.57 | 0.04 |
| 2347 | K1061R | 1061 | 0.96 | 0.43 | 0.11 | 0.5 | 0.35 |
| 2348 | K1061I | 1061 | 0.54 | 0.69 | 0.18 | 0.47 | 0.21 |
| 2349 | K1061Q | 1061 | 0.86 | 0.54 | −0.02 | 0.46 | 0.36 |
| 2350 | K1061T | 1061 | 0.51 | 0.86 | −0.12 | 0.42 | 0.41 |
| 2351 | R1062D | 1062 | 2.47 | 1.35 | 1.08 | 1.64 | 0.6 |
| 2352 | R1062A | 1062 | 1.81 | 1.3 | 1.03 | 1.38 | 0.33 |
| 2353 | R1062M | 1062 | 1.02 | 1.64 | 0.27 | 0.98 | 0.56 |
| 2354 | R1062Y | 1062 | 1.47 | 0.77 | 0.68 | 0.97 | 0.36 |
| 2355 | R1062H | 1062 | 0.35 | 0.95 | 1.08 | 0.8 | 0.32 |
| 2356 | R1062V | 1062 | 0.87 | 1.48 | −0.24 | 0.7 | 0.71 |
| 2357 | E1063W | 1063 | 0.31 | 0.51 | 1.04 | 0.62 | 0.31 |
| 2358 | E1063F | 1063 | 0.79 | 0.09 | 0.42 | 0.43 | 0.29 |
| 2359 | E1063G | 1063 | 0.67 | −0.19 | 0.78 | 0.42 | 0.43 |
| 2360 | I1065W | 1065 | 0.26 | 0.63 | 0.45 | 0.45 | 0.15 |
| 2361 | F1068N | 1068 | 0.08 | 0.95 | 0.36 | 0.47 | 0.36 |
| 2362 | D1069M | 1069 | 0.4 | 0.66 | 1.38 | 0.81 | 0.41 |
| 2363 | S1070E | 1070 | 0.4 | 0.53 | 1.09 | 0.67 | 0.3 |
| 2364 | R1072E | 1072 | −0.51 | 1.51 | 0.4 | 0.47 | 0.83 |
| 2365 | R1072D | 1072 | −0.51 | 1.17 | 0.69 | 0.45 | 0.71 |
| 2366 | D1074S | 1074 | 1.25 | 1.02 | 0.9 | 1.06 | 0.15 |
| 2367 | D1074R | 1074 | 0.4 | 0.95 | 0.91 | 0.75 | 0.25 |
| 2368 | S1075V | 1075 | 0.52 | 0.36 | 0.53 | 0.47 | 0.08 |
| 2369 | E1076T | 1076 | 0.89 | 0.22 | 0.43 | 0.51 | 0.28 |
| 2370 | K1077R | 1077 | 0.72 | 0.76 | 0.79 | 0.76 | 0.03 |
| 2371 | C1081A | 1081 | 0.19 | 0.67 | 1.25 | 0.7 | 0.44 |
| 2372 | C1081I | 1081 | 0.7 | 0.77 | 0.29 | 0.59 | 0.21 |
| 2373 | T1083E | 1083 | 1.03 | 0.96 | 1.2 | 1.07 | 0.1 |
| 2374 | T1083M | 1083 | 0.47 | 1.25 | 1.3 | 1.01 | 0.38 |
| 2375 | T1083K | 1083 | 0.75 | 0.82 | 1.39 | 0.99 | 0.29 |
| 2376 | T1083Y | 1083 | 1.28 | 0.6 | 0.88 | 0.92 | 0.28 |
| 2377 | N1087A | 1087 | 1.01 | 1.13 | 0.6 | 0.91 | 0.23 |
| 2378 | N1087W | 1087 | 0.54 | 0.78 | 1.07 | 0.8 | 0.22 |
| 2379 | N1088P | 1088 | 2.39 | 0.96 | 0 | 1.12 | 0.98 |
| 2380 | N1088A | 1088 | 0.79 | 0.27 | 0.7 | 0.59 | 0.23 |
| 2381 | I1090G | 1090 | 0.19 | 1.88 | 1.95 | 1.34 | 0.81 |
| 2382 | T1091W | 1091 | 1.58 | 0.27 | 0.7 | 0.85 | 0.54 |
| 2383 | T1091C | 1091 | 0.37 | 0.74 | 0.59 | 0.57 | 0.15 |
| 2384 | Q1092C | 1092 | 1.8 | 0.96 | 1.8 | 1.52 | 0.39 |
| 2385 | Q1092I | 1092 | 0.88 | 0.27 | 1.1 | 0.75 | 0.35 |
| 2386 | Q1092A | 1092 | 1.17 | 0.56 | 0.29 | 0.67 | 0.37 |
| 2387 | Q1092F | 1092 | 0.59 | 1.04 | 0.29 | 0.64 | 0.31 |
| 2388 | Q1092Y | 1092 | 0.45 | 0.61 | 0.41 | 0.49 | 0.08 |
| 2389 | N1093C | 1093 | 0.05 | 0.67 | 0.76 | 0.49 | 0.31 |
| 2390 | T1094I | 1094 | 1.58 | 0.27 | 1.39 | 1.08 | 0.58 |
| 2391 | T1094Y | 1094 | 1.11 | 0.67 | 0.7 | 0.83 | 0.2 |
| 2392 | T1094P | 1094 | −0.5 | 0.96 | 1.51 | 0.66 | 0.85 |
| 2393 | V1095A | 1095 | 0.39 | 0.56 | 0.59 | 0.52 | 0.09 |
| 2394 | V1095D | 1095 | 0.41 | 0.59 | 0.49 | 0.49 | 0.07 |
| 2395 | V1095R | 1095 | 0.27 | 0.61 | 0.42 | 0.43 | 0.14 |
| 2396 | M1096C | 1096 | 1.1 | 0.96 | 0 | 0.69 | 0.49 |
| 2397 | S1097D | 1097 | 0.67 | 0.64 | 0.8 | 0.7 | 0.07 |
| 2398 | K1098W | 1098 | 0.88 | 0.96 | 0.51 | 0.79 | 0.2 |
| 2399 | K1098C | 1098 | 0.3 | 0.84 | 0.77 | 0.64 | 0.24 |
| 2400 | K1098V | 1098 | 0.58 | 0.66 | 0.51 | 0.58 | 0.06 |
| 2401 | S1099P | 1099 | 1.02 | 0.72 | 0.45 | 0.73 | 0.23 |
| 2402 | S1099Q | 1099 | 0.32 | 0.77 | 0.69 | 0.59 | 0.19 |
| 2403 | S1100D | 1100 | 1.29 | 0.96 | 1.1 | 1.12 | 0.13 |
| 2404 | S1100G | 1100 | 0.76 | 1.02 | 1.27 | 1.02 | 0.21 |
| 2405 | S1100Q | 1100 | 0.98 | 0.27 | 0.41 | 0.55 | 0.31 |
| 2406 | S1100H | 1100 | 0.59 | 0.18 | 0.77 | 0.52 | 0.25 |
| 2407 | S1100M | 1100 | 0.38 | 0.52 | 0.62 | 0.51 | 0.1 |
| 2408 | Y1106I | 1106 | 0.43 | 0.42 | 0.43 | 0.43 | 0.01 |
| 2409 | K1111R | 1111 | 0.63 | 0.59 | 0.5 | 0.57 | 0.06 |
| 2410 | K1111V | 1111 | 0.71 | 0.24 | 0.42 | 0.46 | 0.19 |
| 2411 | R1113N | 1113 | 0.94 | 0.9 | 1.05 | 0.97 | 0.06 |
| 2412 | R1113K | 1113 | 1.13 | 1.12 | 0.63 | 0.96 | 0.23 |
| 2413 | R1113I | 1113 | 0.67 | 0.65 | 0.69 | 0.67 | 0.02 |
| 2414 | R1113T | 1113 | 0.35 | 0.2 | 1.35 | 0.63 | 0.51 |
| 2415 | R1113E | 1113 | −0.1 | 0.92 | 0.51 | 0.44 | 0.42 |
| 2416 | R1118F | 1118 | 0.7 | 1.04 | 0.84 | 0.86 | 0.14 |
| 2417 | R1118Q | 1118 | −0.22 | 1.25 | 0.98 | 0.67 | 0.64 |
| 2418 | R1118M | 1118 | 0.08 | 1.01 | 0.64 | 0.58 | 0.38 |
| 2419 | F1119W | 1119 | 0.47 | 0.87 | 1.5 | 0.95 | 0.42 |
| 2420 | F1119A | 1119 | 0.3 | 0.93 | 0.31 | 0.52 | 0.29 |
| 2421 | F1119N | 1119 | 0.77 | 0.96 | −0.23 | 0.5 | 0.52 |
| 2422 | S1120D | 1120 | 0.59 | 0.49 | 0.65 | 0.58 | 0.06 |
| 2423 | D1124T | 1124 | 0.59 | 0.27 | 0.4 | 0.42 | 0.13 |
| 2424 | T1125W | 1125 | 2.27 | 2.41 | 1.1 | 1.92 | 0.59 |
| 2425 | T1125D | 1125 | 1.8 | 1.65 | 1.38 | 1.61 | 0.17 |
| 2426 | T1125M | 1125 | 0.64 | 0.72 | 1.63 | 1 | 0.45 |
| 2427 | T1125H | 1125 | 0.41 | 1.18 | 0.81 | 0.8 | 0.32 |
| 2428 | T1125E | 1125 | 0.75 | 0.27 | 0.69 | 0.57 | 0.21 |
| 2429 | I1126C | 1126 | 1.58 | 0.96 | 2.3 | 1.61 | 0.55 |
| 2430 | I1126E | 1126 | 1.58 | 1.37 | 1.61 | 1.52 | 0.11 |
| 2431 | I1126A | 1126 | 0.7 | 0.27 | 1.46 | 0.81 | 0.49 |
| 2432 | T1129V | 1129 | 1.8 | 1.66 | 1.79 | 1.75 | 0.06 |
| 2433 | T1129H | 1129 | 0.19 | 2.22 | 1.94 | 1.45 | 0.9 |
| 2434 | T1129I | 1129 | 0.88 | 0.78 | 0.69 | 0.78 | 0.08 |
| 2435 | D1131L | 1131 | 1 | 0.67 | 0.4 | 0.69 | 0.25 |
| 2436 | D1131S | 1131 | 0.51 | −0.2 | 1.28 | 0.53 | 0.61 |
| 2437 | E1133T | 1133 | 0.19 | 0.67 | 0.4 | 0.42 | 0.2 |
| 2438 | K1134I | 1134 | 0.19 | 0.67 | 1.13 | 0.66 | 0.39 |
| 2439 | T1135V | 1135 | 0.41 | 0.26 | 1.24 | 0.64 | 0.43 |
| 2440 | T1135Q | 1135 | 0.48 | 0.26 | 0.84 | 0.53 | 0.24 |
| 2441 | T1135R | 1135 | 0.96 | 0.55 | −0.19 | 0.44 | 0.48 |
| 2442 | E1137Q | 1137 | 0.51 | 0.26 | 0.62 | 0.46 | 0.15 |
| 2443 | E1137L | 1137 | 0.86 | 0.6 | −0.14 | 0.44 | 0.42 |
| 2444 | E1137N | 1137 | 0.45 | 0.53 | 0.33 | 0.44 | 0.08 |
| 2445 | M1138G | 1138 | 1.89 | 2.46 | 1.38 | 1.91 | 0.44 |
| 2446 | M1138D | 1138 | 3.23 | 0.26 | 0.68 | 1.39 | 1.31 |
| 2447 | T1139V | 1139 | 0.81 | 1.58 | 0.99 | 1.12 | 0.33 |
| 2448 | T1139Y | 1139 | 0.85 | 0.63 | 0.55 | 0.67 | 0.13 |
| 2449 | T1139Q | 1139 | 0.71 | 0.53 | 0.13 | 0.46 | 0.24 |
| 2450 | I1141P | 1141 | 0.57 | 0.96 | 0.95 | 0.82 | 0.18 |
| 2451 | I1141C | 1141 | 0.59 | 0.38 | 0.48 | 0.48 | 0.09 |
| 2452 | N1142A | 1142 | 0.33 | 0.58 | 0.46 | 0.46 | 0.1 |
| 2453 | W1143F | 1143 | 0.23 | 0.55 | 0.5 | 0.43 | 0.14 |
| 2454 | D1145F | 1145 | 0.74 | 0.31 | 0.3 | 0.45 | 0.2 |
| 2455 | G1146K | 1146 | 0.52 | 0.53 | 0.35 | 0.47 | 0.08 |
| 2456 | R1150N | 1150 | 1.1 | 1.18 | 1.08 | 1.12 | 0.04 |
| 2457 | Q1151C | 1151 | 0.82 | 0.43 | 0.3 | 0.52 | 0.22 |
| 2458 | D1155M | 1155 | 0.57 | 0.52 | 0.5 | 0.53 | 0.03 |
| 2459 | I1158A | 1158 | 0.79 | 0.33 | 0.54 | 0.55 | 0.19 |
| 2460 | V1159D | 1159 | 0.77 | 0.43 | 1 | 0.74 | 0.24 |
| 2461 | F1163C | 1163 | 0.44 | 0.94 | 0.59 | 0.66 | 0.21 |
| 2462 | F1163N | 1163 | 0.5 | 0.37 | 0.53 | 0.47 | 0.07 |
| 2463 | E1164P | 1164 | 1 | 0.25 | 0.2 | 0.48 | 0.36 |
| 2464 | I1165A | 1165 | 0.53 | 0.37 | 0.46 | 0.45 | 0.07 |
| 2465 | L1179D | 1179 | 1.06 | 1.38 | 1.22 | 1.22 | 0.13 |
| 2466 | L1179E | 1179 | 0.51 | 0.77 | 0.88 | 0.72 | 0.15 |
| 2467 | L1179N | 1179 | 0.62 | 0.55 | 0.44 | 0.53 | 0.07 |
| 2468 | R1182Y | 1182 | 1.57 | 0.25 | 1.58 | 1.13 | 0.62 |
| 2469 | R1182Q | 1182 | 1.06 | 1.04 | 1 | 1.03 | 0.02 |
| 2470 | R1182K | 1182 | 0.32 | 1.14 | 0.8 | 0.75 | 0.34 |
| 2471 | R1182N | 1182 | 0.59 | −0.04 | 0.78 | 0.44 | 0.35 |
| 2472 | D1183Y | 1183 | 0.89 | 1.03 | 0.91 | 0.94 | 0.06 |
| 2473 | Y1184W | 1184 | 0.68 | 0.5 | 0.35 | 0.51 | 0.13 |
| 2474 | R1186M | 1186 | 0.45 | 0.83 | 0.48 | 0.59 | 0.17 |
| 2475 | L1187M | 1187 | 1.65 | 0.01 | 0.46 | 0.71 | 0.69 |
| 2476 | L1192Y | 1192 | 2.13 | 1.34 | 1.35 | 1.61 | 0.37 |
| 2477 | L1192K | 1192 | 0.43 | 0.49 | 0.41 | 0.45 | 0.03 |
| 2478 | E1194C | 1194 | 0.67 | 0.8 | 1.02 | 0.83 | 0.14 |
| 2479 | E1194S | 1194 | 1.59 | −0.04 | −0.02 | 0.51 | 0.77 |
| 2480 | E1194F | 1194 | 0.52 | 0.62 | 0.2 | 0.45 | 0.18 |
| 2481 | N1195Y | 1195 | 1.9 | 0.51 | 0.11 | 0.84 | 0.76 |
| 2482 | N1195S | 1195 | 0.39 | 0.79 | 0.51 | 0.56 | 0.17 |
| 2483 | N1196A | 1196 | 0.74 | 0.61 | 0.52 | 0.62 | 0.09 |
| 2484 | I1197W | 1197 | 0.13 | 0.69 | 0.74 | 0.52 | 0.28 |
| 2485 | I1197G | 1197 | 0.4 | 0.84 | 0.11 | 0.45 | 0.3 |
| 2486 | A1204C | 1204 | 0.58 | 1.42 | 1.2 | 1.07 | 0.35 |
| 2487 | A1204M | 1204 | 0.76 | 0.67 | 1.13 | 0.86 | 0.2 |
| 2488 | A1204Q | 1204 | 1.16 | 0.53 | 0.39 | 0.69 | 0.33 |
| 2489 | A1204F | 1204 | 0.32 | 0.51 | 0.81 | 0.55 | 0.2 |
| 2490 | A1204D | 1204 | 0.66 | 0.56 | 0.36 | 0.53 | 0.13 |
| 2491 | A1204N | 1204 | 0.51 | 0.37 | 0.54 | 0.47 | 0.08 |
| 2492 | D1206C | 1206 | 1.22 | 1.02 | 1.05 | 1.1 | 0.09 |
| 2493 | D1206I | 1206 | 0.01 | 0.82 | 0.51 | 0.45 | 0.34 |
| 2494 | D1206F | 1206 | 0.38 | 0.3 | 0.65 | 0.44 | 0.15 |
| 2495 | A1207Q | 1207 | 0.97 | 0.58 | 0.54 | 0.7 | 0.19 |
| 2496 | L1208Q | 1208 | 0.78 | 0.03 | 0.51 | 0.44 | 0.31 |
| 2497 | L1208A | 1208 | 0.35 | 0.37 | 0.6 | 0.44 | 0.12 |
| 2498 | D1211C | 1211 | 0.9 | 0.61 | 0.74 | 0.75 | 0.12 |
| 2499 | D1211T | 1211 | 0.64 | 0.68 | 0.7 | 0.67 | 0.02 |
| 2500 | D1211S | 1211 | 0.63 | 0.51 | 0.69 | 0.61 | 0.07 |
| 2501 | A1212C | 1212 | 0.94 | 0.84 | 0.89 | 0.89 | 0.04 |
| 2502 | A1212T | 1212 | 0.8 | 0.74 | 0.7 | 0.75 | 0.04 |
| 2503 | A1212S | 1212 | 0.65 | 0.6 | 0.61 | 0.62 | 0.02 |
| 2504 | A1212V | 1212 | 0.51 | 0.52 | 0.68 | 0.57 | 0.08 |
| 2505 | A1212M | 1212 | 0.5 | 0.5 | 0.33 | 0.44 | 0.08 |
| 2506 | N1215G | 1215 | 0.62 | 0.65 | 0.91 | 0.73 | 0.13 |
| 2507 | E1227T | 1227 | 0.62 | 0.59 | 0.12 | 0.44 | 0.23 |
| 2508 | I1228H | 1228 | 1.39 | 0.87 | 0.4 | 0.89 | 0.4 |
| 2509 | I1228Y | 1228 | 0.89 | 0.18 | 0.65 | 0.57 | 0.29 |
| 2510 | K1229T | 1229 | 0.44 | 0.45 | 0.39 | 0.43 | 0.03 |
| 2511 | Q1230T | 1230 | 0.5 | 0.73 | 0.25 | 0.49 | 0.19 |
| 2512 | Q1230C | 1230 | −0.55 | 0.59 | 1.4 | 0.48 | 0.8 |
| 2513 | Q1230G | 1230 | 0.14 | 1.28 | −0.1 | 0.44 | 0.61 |
| 2514 | E1233W | 1233 | 0.7 | 1.1 | 1.69 | 1.17 | 0.41 |
| 2515 | E1233Y | 1233 | 0.45 | 0.68 | 0.4 | 0.51 | 0.13 |
| 2516 | N1234A | 1234 | 1.53 | 1.58 | 0.41 | 1.17 | 0.54 |
| 2517 | N1234I | 1234 | 0.43 | 1.04 | 1.29 | 0.92 | 0.36 |
| 2518 | N1234E | 1234 | 1.12 | 0.88 | −0.51 | 0.5 | 0.72 |
| 2519 | N1234F | 1234 | 0.83 | −0.22 | 0.75 | 0.45 | 0.48 |
| 2520 | W1235Y | 1235 | 1.64 | 1.69 | 1.15 | 1.5 | 0.24 |
| 2521 | W1235E | 1235 | 0.83 | 0.52 | 1 | 0.78 | 0.2 |
| 2522 | K1236F | 1236 | 0.54 | 1.03 | 0.74 | 0.77 | 0.2 |
| 2523 | K1236P | 1236 | 0.61 | 0.93 | 0.49 | 0.67 | 0.19 |
| 2524 | E1237I | 1237 | 0.63 | 0.62 | 0.72 | 0.66 | 0.04 |
| 2525 | E1237G | 1237 | 0.59 | 0.32 | 1.04 | 0.65 | 0.3 |
| 2526 | E1237A | 1237 | 0.51 | 0.68 | 0.54 | 0.58 | 0.07 |
| 2527 | E1237F | 1237 | 0 | 0.5 | 0.81 | 0.44 | 0.33 |
| 2528 | G1239H | 1239 | 1.24 | 2.06 | 1.15 | 1.48 | 0.41 |
| 2529 | G1239K | 1239 | 0.88 | 0.37 | 0.73 | 0.66 | 0.21 |
| 2530 | G1239T | 1239 | 0.68 | 0.35 | 0.59 | 0.54 | 0.14 |
| 2531 | G1239L | 1239 | 0.57 | 0.42 | 0.51 | 0.5 | 0.06 |
| 2532 | G1239Q | 1239 | 0.14 | 1.18 | 0.15 | 0.49 | 0.49 |
| 2533 | K1240Y | 1240 | 0.63 | 0.43 | 0.72 | 0.59 | 0.12 |
| 2534 | F1241P | 1241 | 0.97 | 0.98 | 0.49 | 0.81 | 0.23 |
| 2535 | S1242E | 1242 | 0.82 | 0.66 | 0.7 | 0.72 | 0.07 |
| 2536 | S1242Q | 1242 | 0.65 | 0.28 | 0.41 | 0.44 | 0.15 |
| 2537 | D1244I | 1244 | 0.5 | 0.85 | 0.85 | 0.73 | 0.16 |
| 2538 | K1245G | 1245 | 0.88 | 0.93 | 1.09 | 0.97 | 0.09 |
| 2539 | K1245V | 1245 | 0.53 | 0.43 | 0.54 | 0.5 | 0.05 |
| 2540 | S1249E | 1249 | 1.06 | 0.6 | 1.04 | 0.9 | 0.21 |
| 2541 | S1249Q | 1249 | 0.51 | 0.71 | 0.81 | 0.67 | 0.12 |
| 2542 | S1249W | 1249 | 0.4 | 0.65 | 0.27 | 0.44 | 0.16 |
| 2543 | N1250L | 1250 | 0.95 | 0.6 | 0.46 | 0.67 | 0.2 |
| 2544 | N1250P | 1250 | 0.58 | 0.63 | 0.46 | 0.56 | 0.07 |
| 2545 | N1250G | 1250 | 0.75 | 0.71 | 0.2 | 0.55 | 0.25 |
| 2546 | N1250A | 1250 | 0.79 | 0.53 | 0.17 | 0.5 | 0.25 |
| 2547 | D1252L | 1252 | 0.14 | 1.99 | 2.11 | 1.41 | 0.9 |
| 2548 | F1254T | 1254 | 0.83 | 0.19 | 0.3 | 0.44 | 0.28 |
| 2549 | D1255M | 1255 | 0.83 | 1.99 | 1.01 | 1.28 | 0.51 |
| 2550 | F1256R | 1256 | 0.83 | 0.19 | 0.6 | 0.54 | 0.26 |
| 2551 | F1256W | 1256 | 0.54 | 0.34 | 0.51 | 0.47 | 0.09 |
| 2552 | K1260G | 1260 | 1.06 | 1.71 | 1.78 | 1.51 | 0.33 |
| 2553 | K1260F | 1260 | 0.14 | 0.54 | 0.7 | 0.46 | 0.23 |
| 2554 | K1260H | 1260 | 0.78 | 0.31 | 0.24 | 0.44 | 0.24 |
| 2555 | R1261Y | 1261 | 1.06 | 0.9 | 1.42 | 1.12 | 0.22 |
| 2556 | R1261V | 1261 | 1.24 | 1.3 | 0.6 | 1.05 | 0.32 |
| 2557 | R1261W | 1261 | 1.59 | 0.76 | 0.32 | 0.89 | 0.53 |
| 2558 | R1261N | 1261 | 0.83 | 0.21 | 1.3 | 0.78 | 0.45 |
| 2559 | R1261M | 1261 | 1.24 | 0.21 | 0.6 | 0.68 | 0.43 |
| 2560 | Y1262M | 1262 | 0.14 | 0.75 | 0.53 | 0.47 | 0.25 |
| 2561 | L1263N | 1263 | 0.92 | 1.31 | 0.61 | 0.95 | 0.29 |
| 2562 | L1263Q | 1263 | 0.77 | 1.1 | 0.81 | 0.89 | 0.15 |
| 2563 | L1263A | 1263 | 0.81 | 0.87 | 0.51 | 0.73 | 0.16 |
| 2564 | L1263E | 1263 | 0.84 | 0.83 | 0.37 | 0.68 | 0.22 |

[0145] The polynucleotide and polypeptide sequences of the 2564 mutants shown in Table 2 are not provided. A person having ordinary skill in the art would understand that the mutations can be created from the wild type ERCAS12A nucleotide or polypeptide sequences by changing the codons for the wild type amino acid and changing them to a codon for the mutant amino acid. For Example, ERCAS12A mutant 1 shown in Table 2, “M1G” indicates that methionine 1 was changed to a glycine in the polypeptide sequence. Similarly, the wild type codon for methionine 1, “ATG,” can be changed to any one of the E. coli glycine codons “GGT,” GGC,” GGA,” or “GGG” to create the mutant polynucleotide coding sequence that would encode a glycine at position 1. The codons for the ERCAS12A amino acids can be optimized for a specific organism such as E. coli, Homo sapiens, or other organisms by changing the coding strand codons to codons which are most commonly used in the respective organsim.

[0146] To demonstrate the utility of these results, a set of ERCAS12A variants were selectively cloned with point mutations (135L, G39K, G39Q, 140Q, D56P, D56R, D291N, V296R, P297F, P297V, F465R, S469K, 1498K, Y507S, Y507W, Q510V, and Q510Y), and tested their activities in the context of bacteria selection assay. As shown in FIG. 2-5 most of the characterized mutants improved the survival rate of bacteria over WT-ERCAS12A (SEQ ID NO: 2) upon selection, thus validating the result of high-throughput screening. Since the survival rate in the bacterial assay is linked to the intrinsic cleavage activity of ERCAS12A nuclease, these mutants hold great promise for human genome engineering with improved performance over WT enzyme.

[0147] Table 3 shows the primer sequences used to generate an ERCAS12A saturation mutagenesis library. Standard recombinant methods and techniques were used. The screening library was constructed using the method descried in Wrenbeck et al., Nat. Methods 13(11):928-930 (2016).

[0148] The screen works by transforming a screening strain harboring a toxin plasmid with the mutant ERCAS12A library and crRNA targeting the HPRT38346 site on the toxin plasmid. After recovery and IPTG induction, cells were plated on LB-chloramphenicol media with arabinose and incubated at 37° C. overnight. Functional ERCAS12A enzymes are capable of CRISPR activity and deactivate the toxin plasmid. If the mutant LbCas12a enzyme is not functional the transformed screening E. coli cells do not survive. ERCAS12A expression plasmids carried by the surviving E. coli cells were extracted and purified. Both input and selected plasmid libraries were amplified by PCR, randomly fragmented, and sequenced. The frequencies of mutations at each position of ERCAS12A in both libraries were measured and normalized to the total coverage of each codon. The relative survival rate of each point mutation was calculated as the ratio of normalized frequency between selected and input library. Since the degree of cell survival under the arabinose selection is indicative of the cleavage activity of ERCAS12A variant at HPRT38346 protospacer, any variants that enriched during the selection over WT are those with enhanced activity at the TTTT PAM.

TABLE 3
Primer Sequences for ERCAS12A Saturation Mutagenesis Library

| | SEQ ID | |
|---|---|---|
| Name | NO | DNA Sequence (5′→3′) |
| ERCAS12A- | 211 | /5Phos/taagtataagaaggagatatacatNNKAATAACGGTACCAATAACTTTCAA |
| P1 | | |
| ERCAS12A- | 212 | /5Phos/gtataagaaggagatatacatatgNNKAACGGTACCAATAACTTTCAAAAT |
| P2 | | |
| ERCAS12A- | 213 | /5Phos/taagaaggagatatacatatgAATNNKGGTACCAATAACTTTCAAAATTTT |
| P3 | | |
| ERCAS12A- | 214 | /5Phos/gaaggagatatacatatgAATAACNNKACCAATAACTTTCAAAATTTTATC |
| P4 | | |
| ERCAS12A- | 215 | /5Phos/ggagatatacatatgAATAACGGTNNKAATAACTTTCAAAATTTTATCGGG |
| P5 | | |
| ERCAS12A- | 216 | /5Phos/gatatacatatgAATAACGGTACCNNKAACTTTCAAAATTTTATCGGGATC |
| P6 | | |
| ERCAS12A- | 217 | /5Phos/atacatatgAATAACGGTACCAATNNKTTTCAAAATTTTATCGGGATCTCC |
| P7 | | |
| ERCAS12A- | 218 | /5Phos/catatgAATAACGGTACCAATAACNNKCAAAATTTTATCGGGATCTCCTCG |
| P8 | | |
| ERCAS12A- | 219 | /5Phos/atgAATAACGGTACCAATAACTTTNNKAATTTTATCGGGATCTCCTCGTTG |
| P9 | | |
| ERCAS12A- | 220 | /5Phos/AATAACGGTACCAATAACTTTCAANNKTTTATCGGGATCTCCTCGTTGCAA |
| P10 | | |
| ERCAS12A- | 221 | /5Phos/AACGGTACCAATAACTTTCAAAATNNKATCGGGATCTCCTCGTTGCAAAAA |
| P11 | | |
| ERCAS12A- | 222 | /5Phos/GGTACCAATAACTTTCAAAATTTTNNKGGGATCTCCTCGTTGCAAAAAACT |
| P12 | | |
| ERCAS12A- | 223 | /5Phos/ACCAATAACTTTCAAAATTTTATCNNKATCTCCTCGTTGCAAAAAACTCTT |
| P13 | | |
| ERCAS12A- | 224 | /5Phos/AATAACTTTCAAAATTTTATCGGGNNKTCCTCGTTGCAAAAAACTCTTCGT |
| P14 | | |
| ERCAS12A- | 225 | /5Phos/AACTTTCAAAATTTTATCGGGATCNNKTCGTTGCAAAAAACTCTTCGTAAT |
| P15 | | |
| ERCAS12A- | 226 | /5Phos/TTTCAAAATTTTATCGGGATCTCCNNKTTGCAAAAAACTCTTCGTAATGCT |
| P16 | | |
| ERCAS12A- | 227 | /5Phos/CAAAATTTTATCGGGATCTCCTCGNNKCAAAAAACTCTTCGTAATGCTTTA |
| P17 | | |
| ERCAS12A- | 228 | /5Phos/AATTTTATCGGGATCTCCTCGTTGNNKAAAACTCTTCGTAATGCTTTAATC |
| P18 | | |
| ERCAS12A- | 229 | /5Phos/TTTATCGGGATCTCCTCGTTGCAANNKACTCTTCGTAATGCTTTAATCCCG |
| P19 | | |
| ERCAS12A- | 230 | /5Phos/ATCGGGATCTCCTCGTTGCAAAAANNKCTTCGTAATGCTTTAATCCCGACT |
| P20 | | |
| ERCAS12A- | 231 | /5Phos/GGGATCTCCTCGTTGCAAAAAACTNNKCGTAATGCTTTAATCCCGACTGAG |
| P21 | | |
| ERCAS12A- | 232 | /5Phos/ATCTCCTCGTTGCAAAAAACTCTTNNKAATGCTTTAATCCCGACTGAGACA |
| 22 | | |
| ERCAS12A- | 233 | /5Phos/TCCTCGTTGCAAAAAACTCTTCGTNNKGCTTTAATCCCGACTGAGACAACA |
| P23 | | |
| ERCAS12A- | 234 | /5Phos/TCGTTGCAAAAAACTCTTCGTAATNNKTTAATCCCGACTGAGACAACACAG |
| P24 | | |
| ERCAS12A- | 235 | /5Phos/TTGCAAAAAACTCTTCGTAATGCTNNKATCCCGACTGAGACAACACAGCAG |
| P25 | | |
| ERCAS12A- | 236 | /5Phos/CAAAAAACTCTTCGTAATGCTTTANNKCCGACTGAGACAACACAGCAGTTC |
| P26 | | |
| ERCAS12A- | 237 | /5Phos/AAAACTCTTCGTAATGCTTTAATCNNKACTGAGACAACACAGCAGTTCATC |
| P27 | | |
| ERCAS12A- | 238 | /5Phos/ACTCTTCGTAATGCTTTAATCCCGNNKGAGACAACACAGCAGTTCATCGTT |
| P28 | | |
| ERCAS12A- | 239 | /5Phos/CTTCGTAATGCTTTAATCCCGACTNNKACAACACAGCAGTTCATCGTTAAA |
| P29 | | |
| ERCAS12A- | 240 | /5Phos/CGTAATGCTTTAATCCCGACTGAGNNKACACAGCAGTTCATCGTTAAAAAC |
| P30 | | |
| ERCAS12A- | 241 | /5Phos/AATGCTTTAATCCCGACTGAGACANNKCAGCAGTTCATCGTTAAAAACGGC |
| P31 | | |
| ERCAS12A- | 242 | /5Phos/GCTTTAATCCCGACTGAGACAACANNKCAGTTCATCGTTAAAAACGGCATC |
| P32 | | |
| ERCAS12A- | 243 | /5Phos/TTAATCCCGACTGAGACAACACAGNNKTTCATCGTTAAAAACGGCATCATT |
| P33 | | |
| ERCAS12A- | 244 | /5Phos/ATCCCGACTGAGACAACACAGCAGNNKATCGTTAAAAACGGCATCATTAAA |
| P34 | | |
| ERCAS12A- | 245 | /5Phos/CCGACTGAGACAACACAGCAGTTCNNKGTTAAAAACGGCATCATTAAAGAA |
| P35 | | |
| ERCAS12A- | 246 | /5Phos/ACTGAGACAACACAGCAGTTCATCNNKAAAAACGGCATCATTAAAGAAGAT |
| P36 | | |
| ERCAS12A- | 247 | /5Phos/GAGACAACACAGCAGTTCATCGTTNNKAACGGCATCATTAAAGAAGATGAG |
| P37 | | |
| ERCAS12A- | 248 | /5Phos/ACAACACAGCAGTTCATCGTTAAANNKGGCATCATTAAAGAAGATGAGCTG |
| P38 | | |
| ERCAS12A- | 249 | /5Phos/ACACAGCAGTTCATCGTTAAAAACNNKATCATTAAAGAAGATGAGCTGCGC |
| P39 | | |
| ERCAS12A- | 250 | /5Phos/CAGCAGTTCATCGTTAAAAACGGCNNKATTAAAGAAGATGAGCTGCGCGGC |
| P40 | | |
| ERCAS12A- | 251 | /5Phos/CAGTTCATCGTTAAAAACGGCATCNNKAAAGAAGATGAGCTGCGCGGCGAG |
| P41 | | |
| ERCAS12A- | 252 | /5Phos/TTCATCGTTAAAAACGGCATCATTNNKGAAGATGAGCTGCGCGGCGAGAAC |
| P42 | | |
| ERCAS12A- | 253 | /5Phos/ATCGTTAAAAACGGCATCATTAAANNKGATGAGCTGCGCGGCGAGAACCGT |
| P43 | | |
| ERCAS12A- | 254 | /5Phos/GTTAAAAACGGCATCATTAAAGAANNKGAGCTGCGCGGCGAGAACCGTCAG |
| P44 | | |
| ERCAS12A- | 255 | /5Phos/AAAAACGGCATCATTAAAGAAGATNNKCTGCGCGGCGAGAACCGTCAGATT |
| P45 | | |
| ERCAS12A- | 256 | /5Phos/AACGGCATCATTAAAGAAGATGAGNNKCGCGGCGAGAACCGTCAGATTTTA |
| P46 | | |
| ERCAS12A- | 257 | /5Phos/GGCATCATTAAAGAAGATGAGCTGNNKGGCGAGAACCGTCAGATTTTAAAG |
| P47 | | |
| ERCAS12A- | 258 | /5Phos/ATCATTAAAGAAGATGAGCTGCGCNNKGAGAACCGTCAGATTTTAAAGGAC |
| P48 | | |
| ERCAS12A | 259 | /5Phos/ATTAAAGAAGATGAGCTGCGCGGCNNKAACCGTCAGATTTTAAAGGACATC |
| P49 | | |
| ERCAS12A- | 260 | /5Phos/AAAGAAGATGAGCTGCGCGGCGAGNNKCGTCAGATTTTAAAGGACATCATG |
| P50 | | |
| ERCAS12A- | 261 | /5Phos/GAAGATGAGCTGCGCGGCGAGAACNNKCAGATTTTAAAGGACATCATGGAC |
| P51 | | |
| ERCAS12A | 262 | /5Phos/GATGAGCTGCGCGGCGAGAACCGTNNKATTTTAAAGGACATCATGGACGAC |
| P52 | | |
| ERCAS12A- | 263 | /5Phos/GAGCTGCGCGGCGAGAACCGTCAGNNKTTAAAGGACATCATGGACGACTAT |
| P53 | | |
| ERCAS12A- | 264 | /5Phos/CTGCGCGGCGAGAACCGTCAGATTNNKAAGGACATCATGGACGACTATTAC |
| P54 | | |
| ERCAS12A- | 265 | /5Phos/CGCGGCGAGAACCGTCAGATTTTANNKGACATCATGGACGACTATTACCGT |
| P55 | | |
| ERCAS12A- | 266 | /5Phos/GGCGAGAACCGTCAGATTTTAAAGNNKATCATGGACGACTATTACCGTGGG |
| P56 | | |
| ERCAS12A- | 267 | /5Phos/GAGAACCGTCAGATTTTAAAGGACNNKATGGACGACTATTACCGTGGGTTC |
| P57 | | |
| ERCAS12A- | 268 | /5Phos/AACCGTCAGATTTTAAAGGACATCNNKGACGACTATTACCGTGGGTTCATC |
| P58 | | |
| ERCAS12A- | 269 | /5Phos/CGTCAGATTTTAAAGGACATCATGNNKGACTATTACCGTGGGTTCATCTCA |
| P59 | | |
| ERCAS12A- | 270 | /5Phos/CAGATTTTAAAGGACATCATGGACNNKTATTACCGTGGGTTCATCTCAGAA |
| P60 | | |
| ERCAS12A- | 271 | /5Phos/ATTTTAAAGGACATCATGGACGACNNKTACCGTGGGTTCATCTCAGAAACA |
| P61 | | |
| ERCAS12A- | 272 | /5Phos/TTAAAGGACATCATGGACGACTATNNKCGTGGGTTCATCTCAGAAACATTA |
| P62 | | |
| ERCAS12A | 273 | /5Phos/AAGGACATCATGGACGACTATTACNNKGGGTTCATCTCAGAAACATTAAGC |
| P63 | | |
| ERCAS12A- | 274 | /5Phos/GACATCATGGACGACTATTACCGTNNKTTCATCTCAGAAACATTAAGCAGC |
| P64 | | |
| ERCAS12A- | 275 | /5Phos/ATCATGGACGACTATTACCGTGGGNNKATCTCAGAAACATTAAGCAGCATC |
| P65 | | |
| ERCAS12A- | 276 | /5Phos/ATGGACGACTATTACCGTGGGTTCNNKTCAGAAACATTAAGCAGCATCGAT |
| P66 | | |
| ERCAS12A- | 277 | /5Phos/GACGACTATTACCGTGGGTTCATCNNKGAAACATTAAGCAGCATCGATGAT |
| P67 | | |
| ERCAS12A- | 278 | /5Phos/GACTATTACCGTGGGTTCATCTCANNKACATTAAGCAGCATCGATGATATC |
| P68 | | |
| ERCAS12A- | 279 | /5Phos/TATTACCGTGGGTTCATCTCAGAANNKTTAAGCAGCATCGATGATATCGAC |
| P69 | | |
| ERCAS12A- | 280 | /5Phos/TACCGTGGGTTCATCTCAGAAACANNKAGCAGCATCGATGATATCGACTGG |
| P70 | | |
| ERCAS12A- | 281 | /5Phos/CGTGGGTTCATCTCAGAAACATTANNKAGCATCGATGATATCGACTGGACC |
| P71 | | |
| ERCAS12A- | 282 | /5Phos/GGGTTCATCTCAGAAACATTAAGCNNKATCGATGATATCGACTGGACCTCA |
| P72 | | |
| ERCAS12A- | 283 | /5Phos/TTCATCTCAGAAACATTAAGCAGCNNKGATGATATCGACTGGACCTCACTG |
| P73 | | |
| ERCAS12A- | 284 | /5Phos/ATCTCAGAAACATTAAGCAGCATCNNKGATATCGACTGGACCTCACTGTTT |
| P74 | | |
| ERCAS12A- | 285 | /5Phos/TCAGAAACATTAAGCAGCATCGATNNKATCGACTGGACCTCACTGTTTGAG |
| P75 | | |
| ERCAS12A- | 286 | /5Phos/GAAACATTAAGCAGCATCGATGATNNKGACTGGACCTCACTGTTTGAGAAG |
| P76 | | |
| ERCAS12A- | 287 | /5Phos/ACATTAAGCAGCATCGATGATATCNNKTGGACCTCACTGTTTGAGAAGATG |
| P77 | | |
| ERCAS12A- | 288 | /5Phos/TTAAGCAGCATCGATGATATCGACNNKACCTCACTGTTTGAGAAGATGGAG |
| P78 | | |
| ERCAS12A- | 289 | /5Phos/AGCAGCATCGATGATATCGACTGGNNKTCACTGTTTGAGAAGATGGAGATT |
| P79 | | |
| ERCAS12A- | 290 | /5Phos/AGCATCGATGATATCGACTGGACCNNKCTGTTTGAGAAGATGGAGATTCAA |
| P80 | | |
| ERCAS12A- | 291 | /5Phos/ATCGATGATATCGACTGGACCTCANNKTTTGAGAAGATGGAGATTCAACTT |
| P81 | | |
| ERCAS12A- | 292 | /5Phos/GATGATATCGACTGGACCTCACTGNNKGAGAAGATGGAGATTCAACTTAAG |
| P82 | | |
| ERCAS12A- | 293 | /5Phos/GATATCGACTGGACCTCACTGTTTNNKAAGATGGAGATTCAACTTAAGAAT |
| P83 | | |
| ERCAS12A- | 294 | /5Phos/ATCGACTGGACCTCACTGTTTGAGNNKATGGAGATTCAACTTAAGAATGGA |
| P84 | | |
| ERCAS12A- | 295 | /5Phos/GACTGGACCTCACTGTTTGAGAAGNNKGAGATTCAACTTAAGAATGGAGAC |
| P85 | | |
| ERCAS12A- | 296 | /5Phos/TGGACCTCACTGTTTGAGAAGATGNNKATTCAACTTAAGAATGGAGACAAC |
| P86 | | |
| ERCAS12A- | 297 | /5Phos/ACCTCACTGTTTGAGAAGATGGAGNNKCAACTTAAGAATGGAGACAACAAA |
| P87 | | |
| ERCAS12A- | 298 | /5Phos/TCACTGTTTGAGAAGATGGAGATTNNKCTTAAGAATGGAGACAACAAAGAC |
| P88 | | |
| ERCAS12A- | 299 | /5Phos/CTGTTTGAGAAGATGGAGATTCAANNKAAGAATGGAGACAACAAAGACACT |
| P89 | | |
| ERCAS12A- | 300 | /5Phos/TTTGAGAAGATGGAGATTCAACTTNNKAATGGAGACAACAAAGACACTTTA |
| P90 | | |
| ERCAS12A- | 301 | /5Phos/GAGAAGATGGAGATTCAACTTAAGNNKGGAGACAACAAAGACACTTTAATT |
| P91 | | |
| ERCAS12A- | 302 | /5Phos/AAGATGGAGATTCAACTTAAGAATNNKGACAACAAAGACACTTTAATTAAG |
| P92 | | |
| ERCAS12A- | 303 | /5Phos/ATGGAGATTCAACTTAAGAATGGANNKAACAAAGACACTTTAATTAAGGAG |
| P93 | | |
| ERCAS12A- | 304 | /5Phos/GAGATTCAACTTAAGAATGGAGACNNKAAAGACACTTTAATTAAGGAGCAG |
| P94 | | |
| ERCAS12A- | 305 | /5Phos/ATTCAACTTAAGAATGGAGACAACNNKGACACTTTAATTAAGGAGCAGACG |
| P95 | | |
| ERCAS12A- | 306 | /5Phos/CAACTTAAGAATGGAGACAACAAANNKACTTTAATTAAGGAGCAGACGGAA |
| P96 | | |
| ERCAS12A- | 307 | /5Phos/CTTAAGAATGGAGACAACAAAGACNNKTTAATTAAGGAGCAGACGGAATAT |
| P97 | | |
| ERCAS12A- | 308 | /5Phos/AAGAATGGAGACAACAAAGACACTNNKATTAAGGAGCAGACGGAATATCGT |
| P98 | | |
| ERCAS12A- | 309 | /5Phos/AATGGAGACAACAAAGACACTTTANNKAAGGAGCAGACGGAATATCGTAAA |
| P99 | | |
| ERCAS12A- | 310 | /5Phos/GGAGACAACAAAGACACTTTAATTNNKGAGCAGACGGAATATCGTAAAGCT |
| P100 | | |
| ERCAS12A- | 311 | /5Phos/GACAACAAAGACACTTTAATTAAGNNKCAGACGGAATATCGTAAAGCTATC |
| P101 | | |
| ERCAS12A- | 312 | /5Phos/AACAAAGACACTTTAATTAAGGAGNNKACGGAATATCGTAAAGCTATCCAT |
| P102 | | |
| ERCAS12A- | 313 | /5Phos/AAAGACACTTTAATTAAGGAGCAGNNKGAATATCGTAAAGCTATCCATAAA |
| P103 | | |
| ERCAS12A- | 314 | /5Phos/GACACTTTAATTAAGGAGCAGACGNNKTATCGTAAAGCTATCCATAAAAAA |
| P104 | | |
| ERCAS12A- | 315 | /5Phos/ACTTTAATTAAGGAGCAGACGGAANNKCGTAAAGCTATCCATAAAAAATTT |
| P105 | | |
| ERCAS12A- | 316 | /5Phos/TTAATTAAGGAGCAGACGGAATATNNKAAAGCTATCCATAAAAAATTTGCA |
| P106 | | |
| ERCAS12A- | 317 | /5Phos/ATTAAGGAGCAGACGGAATATCGTNNKGCTATCCATAAAAAATTTGCAAAC |
| P107 | | |
| ERCAS12A- | 318 | /5Phos/AAGGAGCAGACGGAATATCGTAAANNKATCCATAAAAAATTTGCAAACGAT |
| P108 | | |
| ERCAS12A- | 319 | /5Phos/GAGCAGACGGAATATCGTAAAGCTNNKCATAAAAAATTTGCAAACGATGAC |
| P109 | | |
| ERCAS12A- | 320 | /5Phos/CAGACGGAATATCGTAAAGCTATCNNKAAAAAATTTGCAAACGATGACCGT |
| P110 | | |
| ERCAS12A- | 321 | /5Phos/ACGGAATATCGTAAAGCTATCCATNNKAAATTTGCAAACGATGACCGTTTC |
| P111 | | |
| ERCAS12A- | 322 | /5Phos/GAATATCGTAAAGCTATCCATAAANNKTTTGCAAACGATGACCGTTTCAAA |
| P112 | | |
| ERCAS12A- | 323 | /5Phos/TATCGTAAAGCTATCCATAAAAAANNKGCAAACGATGACCGTTTCAAAAAT |
| P113 | | |
| ERCAS12A- | 324 | /5Phos/CGTAAAGCTATCCATAAAAAATTTNNKAACGATGACCGTTTCAAAAATATG |
| P114 | | |
| ERCAS12A- | 325 | /5Phos/AAAGCTATCCATAAAAAATTTGCANNKGATGACCGTTTCAAAAATATGTTT |
| P115 | | |
| ERCAS12A- | 326 | /5Phos/GCTATCCATAAAAAATTTGCAAACNNKGACCGTTTCAAAAATATGTTTTCC |
| P116 | | |
| ERCAS12A- | 327 | /5Phos/ATCCATAAAAAATTTGCAAACGATNNKCGTTTCAAAAATATGTTTTCCGCA |
| P117 | | |
| ERCAS12A- | 328 | /5Phos/CATAAAAAATTTGCAAACGATGACNNKTTCAAAAATATGTTTTCCGCAAAA |
| P118 | | |
| ERCAS12A- | 329 | /5Phos/AAAAAATTTGCAAACGATGACCGTNNKAAAAATATGTTTTCCGCAAAATTG |
| P119 | | |
| ERCAS12A- | 330 | /5Phos/AAATTTGCAAACGATGACCGTTTCNNKAATATGTTTTCCGCAAAATTGATT |
| P120 | | |
| ERCAS12A- | 331 | /5Phos/TTTGCAAACGATGACCGTTTCAAANNKATGTTTTCCGCAAAATTGATTAGC |
| P121 | | |
| ERCAS12A- | 332 | /5Phos/GCAAACGATGACCGTTTCAAAAATNNKTTTTCCGCAAAATTGATTAGCGAC |
| P122 | | |
| ERCAS12A- | 333 | /5Phos/AACGATGACCGTTTCAAAAATATGNNKTCCGCAAAATTGATTAGCGACATT |
| P123 | | |
| ERCAS12A- | 334 | /5Phos/GATGACCGTTTCAAAAATATGTTTNNKGCAAAATTGATTAGCGACATTTTA |
| P124 | | |
| ERCAS12A- | 335 | /5Phos/GACCGTTTCAAAAATATGTTTTCCNNKAAATTGATTAGCGACATTTTACCT |
| P125 | | |
| ERCAS12A- | 336 | /5Phos/CGTTTCAAAAATATGTTTTCCGCANNKTTGATTAGCGACATTTTACCTGAA |
| P126 | | |
| ERCAS12A- | 337 | /5Phos/TTCAAAAATATGTTTTCCGCAAAANNKATTAGCGACATTTTACCTGAATTC |
| P127 | | |
| ERCAS12A- | 338 | /5Phos/AAAAATATGTTTTCCGCAAAATTGNNKAGCGACATTTTACCTGAATTCGTA |
| P128 | | |
| ERCAS12A- | 339 | /5Phos/AATATGTTTTCCGCAAAATTGATTNNKGACATTTTACCTGAATTCGTAATC |
| P129 | | |
| ERCAS12A- | 340 | /5Phos/ATGTTTTCCGCAAAATTGATTAGCNNKATTTTACCTGAATTCGTAATCCAT |
| P130 | | |
| ERCAS12A- | 341 | /5Phos/TTTTCCGCAAAATTGATTAGCGACNNKTTACCTGAATTCGTAATCCATAAC |
| P131 | | |
| ERCAS12A- | 342 | /5Phos/TCCGCAAAATTGATTAGCGACATTNNKCCTGAATTCGTAATCCATAACAAC |
| P132 | | |
| ERCAS12A- | 343 | /5Phos/GCAAAATTGATTAGCGACATTTTANNKGAATTCGTAATCCATAACAACAAC |
| P133 | | |
| ERCAS12A- | 344 | /5Phos/AAATTGATTAGCGACATTTTACCTNNKTTCGTAATCCATAACAACAACTAT |
| P134 | | |
| ERCAS12A- | 345 | /5Phos/TTGATTAGCGACATTTTACCTGAANNKGTAATCCATAACAACAACTATTCC |
| P135 | | |
| ERCAS12A- | 346 | /5Phos/ATTAGCGACATTTTACCTGAATTCNNKATCCATAACAACAACTATTCCGCA |
| P136 | | |
| ERCAS12A- | 347 | /5Phos/AGCGACATTTTACCTGAATTCGTANNKCATAACAACAACTATTCCGCATCT |
| P137 | | |
| ERCAS12A- | 348 | /5Phos/GACATTTTACCTGAATTCGTAATCNNKAACAACAACTATTCCGCATCTGAA |
| P138 | | |
| ERCAS12A- | 349 | /5Phos/ATTTTACCTGAATTCGTAATCCATNNKAACAACTATTCCGCATCTGAAAAA |
| P139 | | |
| ERCAS12A- | 350 | /5Phos/TTACCTGAATTCGTAATCCATAACNNKAACTATTCCGCATCTGAAAAAGAG |
| P140 | | |
| ERCAS12A- | 351 | /5Phos/CCTGAATTCGTAATCCATAACAACNNKTATTCCGCATCTGAAAAAGAGGAG |
| P141 | | |
| ERCAS12A- | 352 | /5Phos/GAATTCGTAATCCATAACAACAACNNKTCCGCATCTGAAAAAGAGGAGAAG |
| P142 | | |
| ERCAS12A | 353 | /5Phos/TTCGTAATCCATAACAACAACTATNNKGCATCTGAAAAAGAGGAGAAGACC |
| P143 | | |
| ERCAS12A- | 354 | /5Phos/GTAATCCATAACAACAACTATTCCNNKTCTGAAAAAGAGGAGAAGACCCAA |
| P144 | | |
| ERCAS12A- | 355 | /5Phos/ATCCATAACAACAACTATTCCGCANNKGAAAAAGAGGAGAAGACCCAAGTT |
| P145 | | |
| ERCAS12A- | 356 | /5Phos/CATAACAACAACTATTCCGCATCTNNKAAAGAGGAGAAGACCCAAGTTATC |
| P146 | | |
| ERCAS12A- | 357 | /5Phos/AACAACAACTATTCCGCATCTGAANNKGAGGAGAAGACCCAAGTTATCAAA |
| P147 | | |
| ERCAS12A- | 358 | /5Phos/AACAACTATTCCGCATCTGAAAAANNKGAGAAGACCCAAGTTATCAAACTT |
| P148 | | |
| ERCAS12A- | 359 | /5Phos/AACTATTCCGCATCTGAAAAAGAGNNKAAGACCCAAGTTATCAAACTTTTT |
| P149 | | |
| ERCAS12A- | 360 | /5Phos/TATTCCGCATCTGAAAAAGAGGAGNNKACCCAAGTTATCAAACTTTTTTCA |
| P150 | | |
| ERCAS12A- | 361 | /5Phos/TCCGCATCTGAAAAAGAGGAGAAGNNKCAAGTTATCAAACTTTTTTCACGT |
| P151 | | |
| ERCAS12A- | 362 | /5Phos/GCATCTGAAAAAGAGGAGAAGACCNNKGTTATCAAACTTTTTTCACGTTTC |
| P152 | | |
| ERCAS12A- | 363 | /5Phos/TCTGAAAAAGAGGAGAAGACCCAANNKATCAAACTTTTTTCACGTTTCGCG |
| P153 | | |
| ERCAS12A- | 364 | /5Phos/GAAAAAGAGGAGAAGACCCAAGTTNNKAAACTTTTTTCACGTTTCGCGACA |
| P154 | | |
| ERCAS12A- | 365 | /5Phos/AAAGAGGAGAAGACCCAAGTTATCNNKCTTTTTTCACGTTTCGCGACATCT |
| P155 | | |
| ERCAS12A- | 366 | /5Phos/GAGGAGAAGACCCAAGTTATCAAANNKTTTTCACGTTTCGCGACATCTTTT |
| P156 | | |
| ERCAS12A- | 367 | /5Phos/GAGAAGACCCAAGTTATCAAACTTNNKTCACGTTTCGCGACATCTTTTAAA |
| P157 | | |
| ERCAS12A- | 368 | /5Phos/AAGACCCAAGTTATCAAACTTTTTNNKCGTTTCGCGACATCTTTTAAAGAC |
| P158 | | |
| ERCAS12A- | 369 | /5Phos/ACCCAAGTTATCAAACTTTTTTCANNKTTCGCGACATCTTTTAAAGACTAC |
| P159 | | |
| ERCAS12A- | 370 | /5Phos/CAAGTTATCAAACTTTTTTCACGTNNKGCGACATCTTTTAAAGACTACTTT |
| P160 | | |
| ERCAS12A- | 371 | /5Phos/GTTATCAAACTTTTTTCACGTTTCNNKACATCTTTTAAAGACTACTTTAAG |
| P161 | | |
| ERCAS12A- | 372 | /5Phos/ATCAAACTTTTTTCACGTTTCGCGNNKTCTTTTAAAGACTACTTTAAGAAT |
| P162 | | |
| ERCAS12A- | 373 | /5Phos/AAACTTTTTTCACGTTTCGCGACANNKTTTAAAGACTACTTTAAGAATCGT |
| P163 | | |
| ERCAS12A- | 374 | /5Phos/CTTTTTTCACGTTTCGCGACATCTNNKAAAGACTACTTTAAGAATCGTGCG |
| P164 | | |
| ERCAS12A- | 375 | /5Phos/TTTTCACGTTTCGCGACATCTTTTNNKGACTACTTTAAGAATCGTGCGAAT |
| P165 | | |
| ERCAS12A- | 376 | /5Phos/TCACGTTTCGCGACATCTTTTAAANNKTACTTTAAGAATCGTGCGAATTGT |
| P166 | | |
| ERCAS12A- | 377 | /5Phos/CGTTTCGCGACATCTTTTAAAGACNNKTTTAAGAATCGTGCGAATTGTTTC |
| P167 | | |
| ERCAS12A- | 378 | /5Phos/TTCGCGACATCTTTTAAAGACTACNNKAAGAATCGTGCGAATTGTTTCAGT |
| P168 | | |
| ERCAS12A- | 379 | /5Phos/GCGACATCTTTTAAAGACTACTTTNNKAATCGTGCGAATTGTTTCAGTGCA |
| P169 | | |
| ERCAS12A- | 380 | /5Phos/ACATCTTTTAAAGACTACTTTAAGNNKCGTGCGAATTGTTTCAGTGCAGAT |
| P170 | | |
| ERCAS12A- | 381 | /5Phos/TCTTTTAAAGACTACTTTAAGAATNNKGCGAATTGTTTCAGTGCAGATGAT |
| P171 | | |
| ERCAS12A- | 382 | /5Phos/TTTAAAGACTACTTTAAGAATCGTNNKAATTGTTTCAGTGCAGATGATATT |
| P172 | | |
| ERCAS12A- | 383 | /5Phos/AAAGACTACTTTAAGAATCGTGCGNNKTGTTTCAGTGCAGATGATATTTCG |
| P173 | | |
| ERCAS12A- | 384 | /5Phos/GACTACTTTAAGAATCGTGCGAATNNKTTCAGTGCAGATGATATTTCGTCT |
| P174 | | |
| ERCAS12A- | 385 | /5Phos/TACTTTAAGAATCGTGCGAATTGTNNKAGTGCAGATGATATTTCGTCTAGT |
| P175 | | |
| ERCAS12A- | 386 | /5Phos/TTTAAGAATCGTGCGAATTGTTTCNNKGCAGATGATATTTCGTCTAGTTCA |
| P176 | | |
| ERCAS12A- | 387 | /5Phos/AAGAATCGTGCGAATTGTTTCAGTNNKGATGATATTTCGTCTAGTTCATGT |
| P177 | | |
| ERCAS12A- | 388 | /5Phos/AATCGTGCGAATTGTTTCAGTGCANNKGATATTTCGTCTAGTTCATGTCAC |
| P178 | | |
| ERCAS12A- | 389 | /5Phos/CGTGCGAATTGTTTCAGTGCAGATNNKATTTCGTCTAGTTCATGTCACCGT |
| P179 | | |
| ERCAS12A- | 390 | /5Phos/GCGAATTGTTTCAGTGCAGATGATNNKTCGTCTAGTTCATGTCACCGTATC |
| P180 | | |
| ERCAS12A- | 391 | /5Phos/AATTGTTTCAGTGCAGATGATATTNNKTCTAGTTCATGTCACCGTATCGTG |
| P181 | | |
| ERCAS12A- | 392 | /5Phos/TGTTTCAGTGCAGATGATATTTCGNNKAGTTCATGTCACCGTATCGTGAAT |
| P182 | | |
| ERCAS12A- | 393 | /5Phos/TTCAGTGCAGATGATATTTCGTCTNNKTCATGTCACCGTATCGTGAATGAC |
| P183 | | |
| ERCAS12A- | 394 | /5Phos/AGTGCAGATGATATTTCGTCTAGTNNKTGTCACCGTATCGTGAATGACAAC |
| P184 | | |
| ERCAS12A- | 395 | /5Phos/GCAGATGATATTTCGTCTAGTTCANNKCACCGTATCGTGAATGACAACGCT |
| P185 | | |
| ERCAS12A- | 396 | /5Phos/GATGATATTTCGTCTAGTTCATGTNNKCGTATCGTGAATGACAACGCTGAG |
| P186 | | |
| ERCAS12A- | 397 | /5Phos/GATATTTCGTCTAGTTCATGTCACNNKATCGTGAATGACAACGCTGAGATT |
| P187 | | |
| ERCAS12A- | 398 | /5Phos/ATTTCGTCTAGTTCATGTCACCGTNNKGTGAATGACAACGCTGAGATTTTC |
| P188 | | |
| ERCAS12A- | 399 | /5Phos/TCGTCTAGTTCATGTCACCGTATCNNKAATGACAACGCTGAGATTTTCTTT |
| P189 | | |
| ERCAS12A- | 400 | /5Phos/TCTAGTTCATGTCACCGTATCGTGNNKGACAACGCTGAGATTTTCTTTTCT |
| P190 | | |
| ERCAS12A- | 401 | /5Phos/AGTTCATGTCACCGTATCGTGAATNNKAACGCTGAGATTTTCTTTTCTAAT |
| P191 | | |
| ERCAS12A- | 402 | /5Phos/TCATGTCACCGTATCGTGAATGACNNKGCTGAGATTTTCTTTTCTAATGCG |
| P192 | | |
| ERCAS12A- | 403 | /5Phos/TGTCACCGTATCGTGAATGACAACNNKGAGATTTTCTTTTCTAATGCGTTG |
| P193 | | |
| ERCAS12A- | 404 | /5Phos/CACCGTATCGTGAATGACAACGCTNNKATTTTCTTTTCTAATGCGTTGGTG |
| P194 | | |
| ERCAS12A- | 405 | /5Phos/CGTATCGTGAATGACAACGCTGAGNNKTTCTTTTCTAATGCGTTGGTGTAT |
| P195 | | |
| ERCAS12A- | 406 | /5Phos/ATCGTGAATGACAACGCTGAGATTNNKTTTTCTAATGCGTTGGTGTATCGC |
| P196 | | |
| ERCAS12A- | 407 | /5Phos/GTGAATGACAACGCTGAGATTTTCNNKTCTAATGCGTTGGTGTATCGCCGC |
| P197 | | |
| ERCAS12A- | 408 | /5Phos/AATGACAACGCTGAGATTTTCTTTNNKAATGCGTTGGTGTATCGCCGCATC |
| P198 | | |
| ERCAS12A- | 409 | /5Phos/GACAACGCTGAGATTTTCTTTTCTNNKGCGTTGGTGTATCGCCGCATCGTA |
| P199 | | |
| ERCAS12A- | 410 | /5Phos/AACGCTGAGATTTTCTTTTCTAATNNKTTGGTGTATCGCCGCATCGTAAAG |
| P200 | | |
| ERCAS12A- | 411 | /5Phos/GCTGAGATTTTCTTTTCTAATGCGNNKGTGTATCGCCGCATCGTAAAGTCC |
| P201 | | |
| ERCAS12A- | 412 | /5Phos/GAGATTTTCTTTTCTAATGCGTTGNNKTATCGCCGCATCGTAAAGTCCTTG |
| P202 | | |
| ERCAS12A- | 413 | /5Phos/ATTTTCTTTTCTAATGCGTTGGTGNNKCGCCGCATCGTAAAGTCCTTGTCG |
| P203 | | |
| ERCAS12A- | 414 | /5Phos/TTCTTTTCTAATGCGTTGGTGTATNNKCGCATCGTAAAGTCCTTGTCGAAT |
| P204 | | |
| ERCAS12A- | 415 | /5Phos/TTTTCTAATGCGTTGGTGTATCGCNNKATCGTAAAGTCCTTGTCGAATGAT |
| P205 | | |
| ERCAS12A- | 416 | /5Phos/TCTAATGCGTTGGTGTATCGCCGCNNKGTAAAGTCCTTGTCGAATGATGAT |
| P206 | | |
| ERCAS12A- | 417 | /5Phos/AATGCGTTGGTGTATCGCCGCATCNNKAAGTCCTTGTCGAATGATGATATC |
| P207 | | |
| ERCAS12A- | 418 | /5Phos/GCGTTGGTGTATCGCCGCATCGTANNKTCCTTGTCGAATGATGATATCAAC |
| P208 | | |
| ERCAS12A- | 419 | /5Phos/TTGGTGTATCGCCGCATCGTAAAGNNKTTGTCGAATGATGATATCAACAAA |
| P209 | | |
| ERCAS12A- | 420 | /5Phos/GTGTATCGCCGCATCGTAAAGTCCNNKTCGAATGATGATATCAACAAAATT |
| P210 | | |
| ERCAS12A- | 421 | /5Phos/TATCGCCGCATCGTAAAGTCCTTGNNKAATGATGATATCAACAAAATTAGT |
| P211 | | |
| ERCAS12A- | 422 | /5Phos/CGCCGCATCGTAAAGTCCTTGTCGNNKGATGATATCAACAAAATTAGTGGT |
| P212 | | |
| ERCAS12A- | 423 | /5Phos/CGCATCGTAAAGTCCTTGTCGAATNNKGATATCAACAAAATTAGTGGTGAC |
| P213 | | |
| ERCAS12A- | 424 | /5Phos/ATCGTAAAGTCCTTGTCGAATGATNNKATCAACAAAATTAGTGGTGACATG |
| P214 | | |
| ERCAS12A- | 425 | /5Phos/GTAAAGTCCTTGTCGAATGATGATNNKAACAAAATTAGTGGTGACATGAAA |
| P215 | | |
| ERCAS12A- | 426 | /5Phos/AAGTCCTTGTCGAATGATGATATCNNKAAAATTAGTGGTGACATGAAAGAC |
| P216 | | |
| ERCAS12A- | 427 | /5Phos/TCCTTGTCGAATGATGATATCAACNNKATTAGTGGTGACATGAAAGACTCC |
| P217 | | |
| ERCAS12A- | 428 | /5Phos/TTGTCGAATGATGATATCAACAAANNKAGTGGTGACATGAAAGACTCCCTG |
| P218 | | |
| ERCAS12A- | 429 | /5Phos/TCGAATGATGATATCAACAAAATTNNKGGTGACATGAAAGACTCCCTGAAA |
| P219 | | |
| ERCAS12A- | 430 | /5Phos/AATGATGATATCAACAAAATTAGTNNKGACATGAAAGACTCCCTGAAAGAA |
| P220 | | |
| ERCAS12A- | 431 | /5Phos/GATGATATCAACAAAATTAGTGGTNNKATGAAAGACTCCCTGAAAGAAATG |
| P221 | | |
| ERCAS12A- | 432 | /5Phos/GATATCAACAAAATTAGTGGTGACNNKAAAGACTCCCTGAAAGAAATGTCA |
| P222 | | |
| ERCAS12A- | 433 | /5Phos/ATCAACAAAATTAGTGGTGACATGNNKGACTCCCTGAAAGAAATGTCATTA |
| P223 | | |
| ERCAS12A- | 434 | /5Phos/AACAAAATTAGTGGTGACATGAAANNKTCCCTGAAAGAAATGTCATTAGAG |
| P224 | | |
| ERCAS12A- | 435 | /5Phos/AAAATTAGTGGTGACATGAAAGACNNKCTGAAAGAAATGTCATTAGAGGAG |
| P225 | | |
| ERCAS12A- | 436 | /5Phos/ATTAGTGGTGACATGAAAGACTCCNNKAAAGAAATGTCATTAGAGGAGATT |
| P226 | | |
| ERCAS12A- | 437 | /5Phos/AGTGGTGACATGAAAGACTCCCTGNNKGAAATGTCATTAGAGGAGATTTAC |
| P227 | | |
| ERCAS12A- | 438 | /5Phos/GGTGACATGAAAGACTCCCTGAAANNKATGTCATTAGAGGAGATTTACAGC |
| P228 | | |
| ERCAS12A- | 439 | /5Phos/GACATGAAAGACTCCCTGAAAGAANNKTCATTAGAGGAGATTTACAGCTAC |
| P229 | | |
| ERCAS12A- | 440 | /5Phos/ATGAAAGACTCCCTGAAAGAAATGNNKTTAGAGGAGATTTACAGCTACGAA |
| P230 | | |
| ERCAS12A- | 441 | /5Phos/AAAGACTCCCTGAAAGAAATGTCANNKGAGGAGATTTACAGCTACGAAAAA |
| P231 | | |
| ERCAS12A- | 442 | /5Phos/GACTCCCTGAAAGAAATGTCATTANNKGAGATTTACAGCTACGAAAAATAC |
| P232 | | |
| ERCAS12A- | 443 | /5Phos/TCCCTGAAAGAAATGTCATTAGAGNNKATTTACAGCTACGAAAAATACGGA |
| P233 | | |
| ERCAS12A- | 444 | /5Phos/CTGAAAGAAATGTCATTAGAGGAGNNKTACAGCTACGAAAAATACGGAGAG |
| P234 | | |
| ERCAS12A- | 445 | /5Phos/AAAGAAATGTCATTAGAGGAGATTNNKAGCTACGAAAAATACGGAGAGTTC |
| P235 | | |
| ERCAS12A- | 446 | /5Phos/GAAATGTCATTAGAGGAGATTTACNNKTACGAAAAATACGGAGAGTTCATC |
| P236 | | |
| ERCAS12A- | 447 | /5Phos/ATGTCATTAGAGGAGATTTACAGCNNKGAAAAATACGGAGAGTTCATCACT |
| P237 | | |
| ERCAS12A- | 448 | /5Phos/TCATTAGAGGAGATTTACAGCTACNNKAAATACGGAGAGTTCATCACTCAG |
| P238 | | |
| ERCAS12A- | 449 | /5Phos/TTAGAGGAGATTTACAGCTACGAANNKTACGGAGAGTTCATCACTCAGGAA |
| P239 | | |
| ERCAS12A- | 450 | /5Phos/GAGGAGATTTACAGCTACGAAAAANNKGGAGAGTTCATCACTCAGGAAGGT |
| P240 | | |
| ERCAS12A- | 451 | /5Phos/GAGATTTACAGCTACGAAAAATACNNKGAGTTCATCACTCAGGAAGGTATC |
| P241 | | |
| ERCAS12A- | 452 | /5Phos/ATTTACAGCTACGAAAAATACGGANNKTTCATCACTCAGGAAGGTATCTCC |
| P242 | | |
| ERCAS12A- | 453 | /5Phos/TACAGCTACGAAAAATACGGAGAGNNKATCACTCAGGAAGGTATCTCCTTT |
| P243 | | |
| ERCAS12A- | 454 | /5Phos/AGCTACGAAAAATACGGAGAGTTCNNKACTCAGGAAGGTATCTCCTTTTAC |
| P244 | | |
| ERCAS12A- | 455 | /5Phos/TACGAAAAATACGGAGAGTTCATCNNKCAGGAAGGTATCTCCTTTTACAAC |
| P245 | | |
| ERCAS12A- | 456 | /5Phos/GAAAAATACGGAGAGTTCATCACTNNKGAAGGTATCTCCTTTTACAACGAT |
| P246 | | |
| ERCAS12A- | 457 | /5Phos/AAATACGGAGAGTTCATCACTCAGNNKGGTATCTCCTTTTACAACGATATT |
| P247 | | |
| ERCAS12A- | 458 | /5Phos/TACGGAGAGTTCATCACTCAGGAANNKATCTCCTTTTACAACGATATTTGC |
| P248 | | |
| ERCAS12A- | 459 | /5Phos/GGAGAGTTCATCACTCAGGAAGGTNNKTCCTTTTACAACGATATTTGCGGC |
| P249 | | |
| ERCAS12A- | 460 | /5Phos/GAGTTCATCACTCAGGAAGGTATCNNKTTTTACAACGATATTTGCGGCAAA |
| P250 | | |
| ERCAS12A- | 461 | /5Phos/TTCATCACTCAGGAAGGTATCTCCNNKTACAACGATATTTGCGGCAAAGTT |
| P251 | | |
| ERCAS12A- | 462 | /5Phos/ATCACTCAGGAAGGTATCTCCTTTNNKAACGATATTTGCGGCAAAGTTAAT |
| P252 | | |
| ERCAS12A- | 463 | /5Phos/ACTCAGGAAGGTATCTCCTTTTACNNKGATATTTGCGGCAAAGTTAATAGT |
| P253 | | |
| ERCAS12A- | 464 | /5Phos/CAGGAAGGTATCTCCTTTTACAACNNKATTTGCGGCAAAGTTAATAGTTTC |
| P254 | | |
| ERCAS12A- | 465 | /5Phos/GAAGGTATCTCCTTTTACAACGATNNKTGCGGCAAAGTTAATAGTTTCATG |
| P255 | | |
| ERCAS12A- | 466 | /5Phos/GGTATCTCCTTTTACAACGATATTNNKGGCAAAGTTAATAGTTTCATGAAT |
| P256 | | |
| ERCAS12A- | 467 | /5Phos/ATCTCCTTTTACAACGATATTTGCNNKAAAGTTAATAGTTTCATGAATCTG |
| P257 | | |
| ERCAS12A- | 468 | /5Phos/TCCTTTTACAACGATATTTGCGGCNNKGTTAATAGTTTCATGAATCTGTAT |
| P258 | | |
| ERCAS12A- | 469 | /5Phos/TTTTACAACGATATTTGCGGCAAANNKAATAGTTTCATGAATCTGTATTGT |
| P259 | | |
| ERCAS12A- | 470 | /5Phos/TACAACGATATTTGCGGCAAAGTTNNKAGTTTCATGAATCTGTATTGTCAG |
| P260 | | |
| ERCAS12A- | 471 | /5Phos/AACGATATTTGCGGCAAAGTTAATNNKTTCATGAATCTGTATTGTCAGAAG |
| P261 | | |
| ERCAS12A- | 472 | /5Phos/GATATTTGCGGCAAAGTTAATAGTNNKATGAATCTGTATTGTCAGAAGAAT |
| P262 | | |
| ERCAS12A- | 473 | /5Phos/ATTTGCGGCAAAGTTAATAGTTTCNNKAATCTGTATTGTCAGAAGAATAAG |
| P263 | | |
| ERCAS12A- | 474 | /5Phos/TGCGGCAAAGTTAATAGTTTCATGNNKCTGTATTGTCAGAAGAATAAGGAA |
| P264 | | |
| ERCAS12A- | 475 | /5Phos/GGCAAAGTTAATAGTTTCATGAATNNKTATTGTCAGAAGAATAAGGAAAAC |
| P265 | | |
| ERCAS12A- | 476 | /5Phos/AAAGTTAATAGTTTCATGAATCTGNNKTGTCAGAAGAATAAGGAAAACAAG |
| P266 | | |
| ERCAS12A- | 477 | /5Phos/GTTAATAGTTTCATGAATCTGTATNNKCAGAAGAATAAGGAAAACAAGAAT |
| P267 | | |
| ERCAS12A- | 478 | /5Phos/AATAGTTTCATGAATCTGTATTGTNNKAAGAATAAGGAAAACAAGAATCTG |
| P268 | | |
| ERCAS12A- | 479 | /5Phos/AGTTTCATGAATCTGTATTGTCAGNNKAATAAGGAAAACAAGAATCTGTAC |
| P269 | | |
| ERCAS12A- | 480 | /5Phos/TTCATGAATCTGTATTGTCAGAAGNNKAAGGAAAACAAGAATCTGTACAAG |
| P270 | | |
| ERCAS12A- | 481 | /5Phos/ATGAATCTGTATTGTCAGAAGAATNNKGAAAACAAGAATCTGTACAAGTTA |
| P271 | | |
| ERCAS12A- | 482 | /5Phos/AATCTGTATTGTCAGAAGAATAAGNNKAACAAGAATCTGTACAAGTTACAA |
| P272 | | |
| ERCAS12A- | 483 | /5Phos/CTGTATTGTCAGAAGAATAAGGAANNKAAGAATCTGTACAAGTTACAAAAG |
| P273 | | |
| ERCAS12A- | 484 | /5Phos/TATTGTCAGAAGAATAAGGAAAACNNKAATCTGTACAAGTTACAAAAGCTT |
| P274 | | |
| ERCAS12A- | 485 | /5Phos/TGTCAGAAGAATAAGGAAAACAAGNNKCTGTACAAGTTACAAAAGCTTCAT |
| P275 | | |
| ERCAS12A- | 486 | /5Phos/CAGAAGAATAAGGAAAACAAGAATNNKTACAAGTTACAAAAGCTTCATAAA |
| P276 | | |
| ERCAS12A- | 487 | /5Phos/AAGAATAAGGAAAACAAGAATCTGNNKAAGTTACAAAAGCTTCATAAACAG |
| P277 | | |
| ERCAS12A- | 488 | /5Phos/AATAAGGAAAACAAGAATCTGTACNNKTTACAAAAGCTTCATAAACAGATC |
| P278 | | |
| ERCAS12A- | 489 | /5Phos/AAGGAAAACAAGAATCTGTACAAGNNKCAAAAGCTTCATAAACAGATCTTG |
| P279 | | |
| ERCAS12A- | 490 | /5Phos/GAAAACAAGAATCTGTACAAGTTANNKAAGCTTCATAAACAGATCTTGTGC |
| P280 | | |
| ERCAS12A- | 491 | /5Phos/AACAAGAATCTGTACAAGTTACAANNKCTTCATAAACAGATCTTGTGCATC |
| P281 | | |
| ERCAS12A- | 492 | /5Phos/AAGAATCTGTACAAGTTACAAAAGNNKCATAAACAGATCTTGTGCATCGCC |
| P282 | | |
| ERCAS12A- | 493 | /5Phos/AATCTGTACAAGTTACAAAAGCTTNNKAAACAGATCTTGTGCATCGCCGAC |
| P283 | | |
| ERCAS12A- | 494 | /5Phos/CTGTACAAGTTACAAAAGCTTCATNNKCAGATCTTGTGCATCGCCGACACG |
| P284 | | |
| ERCAS12A- | 495 | /5Phos/TACAAGTTACAAAAGCTTCATAAANNKATCTTGTGCATCGCCGACACGTCT |
| P285 | | |
| ERCAS12A- | 496 | /5Phos/AAGTTACAAAAGCTTCATAAACAGNNKTTGTGCATCGCCGACACGTCTTAT |
| P286 | | |
| ERCAS12A- | 497 | /5Phos/TTACAAAAGCTTCATAAACAGATCNNKTGCATCGCCGACACGTCTTATGAA |
| P287 | | |
| ERCAS12A- | 498 | /5Phos/CAAAAGCTTCATAAACAGATCTTGNNKATCGCCGACACGTCTTATGAAGTC |
| P288 | | |
| ERCAS12A- | 499 | /5Phos/AAGCTTCATAAACAGATCTTGTGCNNKGCCGACACGTCTTATGAAGTCCCG |
| P289 | | |
| ERCAS12A- | 500 | /5Phos/CTTCATAAACAGATCTTGTGCATCNNKGACACGTCTTATGAAGTCCCGTAT |
| P290 | | |
| ERCAS12A- | 501 | /5Phos/CATAAACAGATCTTGTGCATCGCCNNKACGTCTTATGAAGTCCCGTATAAA |
| P291 | | |
| ERCAS12A- | 502 | /5Phos/AAACAGATCTTGTGCATCGCCGACNNKTCTTATGAAGTCCCGTATAAATTT |
| P292 | | |
| ERCAS12A- | 503 | /5Phos/CAGATCTTGTGCATCGCCGACACGNNKTATGAAGTCCCGTATAAATTTGAA |
| P293 | | |
| ERCAS12A- | 504 | /5Phos/ATCTTGTGCATCGCCGACACGTCTNNKGAAGTCCCGTATAAATTTGAAAGC |
| P294 | | |
| ERCAS12A- | 505 | /5Phos/TTGTGCATCGCCGACACGTCTTATNNKGTCCCGTATAAATTTGAAAGCGAC |
| P295 | | |
| ERCAS12A- | 506 | /5Phos/TGCATCGCCGACACGTCTTATGAANNKCCGTATAAATTTGAAAGCGACGAA |
| P296 | | |
| ERCAS12A- | 507 | /5Phos/ATCGCCGACACGTCTTATGAAGTCNNKTATAAATTTGAAAGCGACGAAGAA |
| P297 | | |
| ERCAS12A- | 508 | /5Phos/GCCGACACGTCTTATGAAGTCCCGNNKAAATTTGAAAGCGACGAAGAAGTA |
| P298 | | |
| ERCAS12A- | 509 | /5Phos/GACACGTCTTATGAAGTCCCGTATNNKTTTGAAAGCGACGAAGAAGTATAT |
| P299 | | |
| ERCAS12A- | 510 | /5Phos/ACGTCTTATGAAGTCCCGTATAAANNKGAAAGCGACGAAGAAGTATATCAG |
| P300 | | |
| ERCAS12A- | 511 | /5Phos/TCTTATGAAGTCCCGTATAAATTTNNKAGCGACGAAGAAGTATATCAGAGT |
| P301 | | |
| ERCAS12A- | 512 | /5Phos/TATGAAGTCCCGTATAAATTTGAANNKGACGAAGAAGTATATCAGAGTGTG |
| P302 | | |
| ERCAS12A- | 513 | /5Phos/GAAGTCCCGTATAAATTTGAAAGCNNKGAAGAAGTATATCAGAGTGTGAAT |
| P303 | | |
| ERCAS12A- | 514 | /5Phos/GTCCCGTATAAATTTGAAAGCGACNNKGAAGTATATCAGAGTGTGAATGGA |
| P304 | | |
| ERCAS12A- | 515 | /5Phos/CCGTATAAATTTGAAAGCGACGAANNKGTATATCAGAGTGTGAATGGATTC |
| P305 | | |
| ERCAS12A- | 516 | /5Phos/TATAAATTTGAAAGCGACGAAGAANNKTATCAGAGTGTGAATGGATTCTTG |
| P306 | | |
| ERCAS12A- | 517 | /5Phos/AAATTTGAAAGCGACGAAGAAGTANNKCAGAGTGTGAATGGATTCTTGGAC |
| P307 | | |
| ERCAS12A- | 518 | /5Phos/TTTGAAAGCGACGAAGAAGTATATNNKAGTGTGAATGGATTCTTGGACAAT |
| P308 | | |
| ERCAS12A- | 519 | /5Phos/GAAAGCGACGAAGAAGTATATCAGNNKGTGAATGGATTCTTGGACAATATC |
| P309 | | |
| ERCAS12A- | 520 | /5Phos/AGCGACGAAGAAGTATATCAGAGTNNKAATGGATTCTTGGACAATATCTCA |
| P310 | | |
| ERCAS12A- | 521 | /5Phos/GACGAAGAAGTATATCAGAGTGTGNNKGGATTCTTGGACAATATCTCATCA |
| P311 | | |
| ERCAS12A- | 522 | /5Phos/GAAGAAGTATATCAGAGTGTGAATNNKTTCTTGGACAATATCTCATCAAAA |
| P312 | | |
| ERCAS12A- | 523 | /5Phos/GAAGTATATCAGAGTGTGAATGGANNKTTGGACAATATCTCATCAAAACAC |
| P313 | | |
| ERCAS12A- | 524 | /5Phos/GTATATCAGAGTGTGAATGGATTCNNKGACAATATCTCATCAAAACACATT |
| P314 | | |
| ERCAS12A- | 525 | /5Phos/TATCAGAGTGTGAATGGATTCTTGNNKAATATCTCATCAAAACACATTGTT |
| P315 | | |
| ERCAS12A- | 526 | /5Phos/CAGAGTGTGAATGGATTCTTGGACNNKATCTCATCAAAACACATTGTTGAA |
| P316 | | |
| ERCAS12A- | 527 | /5Phos/AGTGTGAATGGATTCTTGGACAATNNKTCATCAAAACACATTGTTGAACGT |
| P317 | | |
| ERCAS12A- | 528 | /5Phos/GTGAATGGATTCTTGGACAATATCNNKTCAAAACACATTGTTGAACGTTTG |
| P318 | | |
| ERCAS12A- | 529 | /5Phos/AATGGATTCTTGGACAATATCTCANNKAAACACATTGTTGAACGTTTGCGC |
| P319 | | |
| ERCAS12A- | 530 | /5Phos/GGATTCTTGGACAATATCTCATCANNKCACATTGTTGAACGTTTGCGCAAA |
| P320 | | |
| ERCAS12A- | 531 | /5Phos/TTCTTGGACAATATCTCATCAAAANNKATTGTTGAACGTTTGCGCAAAATC |
| P321 | | |
| ERCAS12A- | 532 | /5Phos/TTGGACAATATCTCATCAAAACACNNKGTTGAACGTTTGCGCAAAATCGGC |
| P322 | | |
| ERCAS12A- | 533 | /5Phos/GACAATATCTCATCAAAACACATTNNKGAACGTTTGCGCAAAATCGGCGAC |
| P323 | | |
| ERCAS12A- | 534 | /5Phos/AATATCTCATCAAAACACATTGTTNNKCGTTTGCGCAAAATCGGCGACAAC |
| P324 | | |
| ERCAS12A- | 535 | /5Phos/ATCTCATCAAAACACATTGTTGAANNKTTGCGCAAAATCGGCGACAACTAT |
| P325 | | |
| ERCAS12A- | 536 | /5Phos/TCATCAAAACACATTGTTGAACGTNNKCGCAAAATCGGCGACAACTATAAC |
| P326 | | |
| ERCAS12A- | 537 | /5Phos/TCAAAACACATTGTTGAACGTTTGNNKAAAATCGGCGACAACTATAACGGA |
| P327 | | |
| ERCAS12A- | 538 | /5Phos/AAACACATTGTTGAACGTTTGCGCNNKATCGGCGACAACTATAACGGATAC |
| P328 | | |
| ERCAS12A- | 539 | /5Phos/CACATTGTTGAACGTTTGCGCAAANNKGGCGACAACTATAACGGATACAAC |
| P329 | | |
| ERCAS12A- | 540 | /5Phos/ATTGTTGAACGTTTGCGCAAAATCNNKGACAACTATAACGGATACAACTTG |
| P330 | | |
| ERCAS12A- | 541 | /5Phos/GTTGAACGTTTGCGCAAAATCGGCNNKAACTATAACGGATACAACTTGGAT |
| P331 | | |
| ERCAS12A- | 542 | /5Phos/GAACGTTTGCGCAAAATCGGCGACNNKTATAACGGATACAACTTGGATAAA |
| P332 | | |
| ERCAS12A- | 543 | /5Phos/CGTTTGCGCAAAATCGGCGACAACNNKAACGGATACAACTTGGATAAAATT |
| P333 | | |
| ERCAS12A- | 544 | /5Phos/TTGCGCAAAATCGGCGACAACTATNNKGGATACAACTTGGATAAAATTTAT |
| P334 | | |
| ERCAS12A- | 545 | /5Phos/CGCAAAATCGGCGACAACTATAACNNKTACAACTTGGATAAAATTTATATC |
| P335 | | |
| ERCAS12A- | 546 | /5Phos/AAAATCGGCGACAACTATAACGGANNKAACTTGGATAAAATTTATATCGTA |
| P336 | | |
| ERCAS12A- | 547 | /5Phos/ATCGGCGACAACTATAACGGATACNNKTTGGATAAAATTTATATCGTATCA |
| P337 | | |
| ERCAS12A- | 548 | /5Phos/GGCGACAACTATAACGGATACAACNNKGATAAAATTTATATCGTATCAAAA |
| P338 | | |
| ERCAS12A- | 549 | /5Phos/GACAACTATAACGGATACAACTTGNNKAAAATTTATATCGTATCAAAATTT |
| P339 | | |
| ERCAS12A- | 550 | /5Phos/AACTATAACGGATACAACTTGGATNNKATTTATATCGTATCAAAATTTTAT |
| P340 | | |
| ERCAS12A- | 551 | /5Phos/TATAACGGATACAACTTGGATAAANNKTATATCGTATCAAAATTTTATGAA |
| P341 | | |
| ERCAS12A- | 552 | /5Phos/AACGGATACAACTTGGATAAAATTNNKATCGTATCAAAATTTTATGAATCA |
| P342 | | |
| ERCAS12A- | 553 | /5Phos/GGATACAACTTGGATAAAATTTATNNKGTATCAAAATTTTATGAATCAGTA |
| P343 | | |
| ERCAS12A- | 554 | /5Phos/TACAACTTGGATAAAATTTATATCNNKTCAAAATTTTATGAATCAGTATCC |
| P344 | | |
| ERCAS12A- | 555 | /5Phos/AACTTGGATAAAATTTATATCGTANNKAAATTTTATGAATCAGTATCCCAA |
| P345 | | |
| ERCAS12A- | 556 | /5Phos/TTGGATAAAATTTATATCGTATCANNKTTTTATGAATCAGTATCCCAAAAG |
| P346 | | |
| ERCAS12A- | 557 | /5Phos/GATAAAATTTATATCGTATCAAAANNKTATGAATCAGTATCCCAAAAGACT |
| P347 | | |
| ERCAS12A- | 558 | /5Phos/AAAATTTATATCGTATCAAAATTTNNKGAATCAGTATCCCAAAAGACTTAC |
| P348 | | |
| ERCAS12A- | 559 | /5Phos/ATTTATATCGTATCAAAATTTTATNNKTCAGTATCCCAAAAGACTTACCGT |
| P349 | | |
| ERCAS12A- | 560 | /5Phos/TATATCGTATCAAAATTTTATGAANNKGTATCCCAAAAGACTTACCGTGAT |
| P350 | | |
| ERCAS12A- | 561 | /5Phos/ATCGTATCAAAATTTTATGAATCANNKTCCCAAAAGACTTACCGTGATTGG |
| P351 | | |
| ERCAS12A- | 562 | /5Phos/GTATCAAAATTTTATGAATCAGTANNKCAAAAGACTTACCGTGATTGGGAG |
| P352 | | |
| ERCAS12A- | 563 | /5Phos/TCAAAATTTTATGAATCAGTATCCNNKAAGACTTACCGTGATTGGGAGACT |
| P353 | | |
| ERCAS12A- | 564 | /5Phos/AAATTTTATGAATCAGTATCCCAANNKACTTACCGTGATTGGGAGACTATT |
| P354 | | |
| ERCAS12A- | 565 | /5Phos/TTTTATGAATCAGTATCCCAAAAGNNKTACCGTGATTGGGAGACTATTAAT |
| P355 | | |
| ERCAS12A- | 566 | /5Phos/TATGAATCAGTATCCCAAAAGACTNNKCGTGATTGGGAGACTATTAATACG |
| P356 | | |
| ERCAS12A- | 567 | /5Phos/GAATCAGTATCCCAAAAGACTTACNNKGATTGGGAGACTATTAATACGGCG |
| P357 | | |
| ERCAS12A- | 568 | /5Phos/TCAGTATCCCAAAAGACTTACCGTNNKTGGGAGACTATTAATACGGCGTTA |
| P358 | | |
| ERCAS12A- | 569 | /5Phos/GTATCCCAAAAGACTTACCGTGATNNKGAGACTATTAATACGGCGTTAGAA |
| P359 | | |
| ERCAS12A- | 570 | /5Phos/TCCCAAAAGACTTACCGTGATTGGNNKACTATTAATACGGCGTTAGAAATC |
| P360 | | |
| ERCAS12A- | 571 | /5Phos/CAAAAGACTTACCGTGATTGGGAGNNKATTAATACGGCGTTAGAAATCCAT |
| P361 | | |
| ERCAS12A- | 572 | /5Phos/AAGACTTACCGTGATTGGGAGACTNNKAATACGGCGTTAGAAATCCATTAC |
| P362 | | |
| ERCAS12A- | 573 | /5Phos/ACTTACCGTGATTGGGAGACTATTNNKACGGCGTTAGAAATCCATTACAAC |
| P363 | | |
| ERCAS12A- | 574 | /5Phos/TACCGTGATTGGGAGACTATTAATNNKGCGTTAGAAATCCATTACAACAAC |
| P364 | | |
| ERCAS12A- | 575 | /5Phos/CGTGATTGGGAGACTATTAATACGNNKTTAGAAATCCATTACAACAACATT |
| P365 | | |
| ERCAS12A- | 576 | /5Phos/GATTGGGAGACTATTAATACGGCGNNKGAAATCCATTACAACAACATTCTG |
| P366 | | |
| ERCAS12A- | 577 | /5Phos/TGGGAGACTATTAATACGGCGTTANNKATCCATTACAACAACATTCTGCCG |
| P367 | | |
| ERCAS12A- | 578 | /5Phos/GAGACTATTAATACGGCGTTAGAANNKCATTACAACAACATTCTGCCGGGT |
| P368 | | |
| ERCAS12A- | 579 | /5Phos/ACTATTAATACGGCGTTAGAAATCNNKTACAACAACATTCTGCCGGGTAAC |
| P369 | | |
| ERCAS12A- | 580 | /5Phos/ATTAATACGGCGTTAGAAATCCATNNKAACAACATTCTGCCGGGTAACGGT |
| P370 | | |
| ERCAS12A- | 581 | /5Phos/AATACGGCGTTAGAAATCCATTACNNKAACATTCTGCCGGGTAACGGTAAA |
| P371 | | |
| ERCAS12A- | 582 | /5Phos/ACGGCGTTAGAAATCCATTACAACNNKATTCTGCCGGGTAACGGTAAATCG |
| P372 | | |
| ERCAS12A- | 583 | /5Phos/GCGTTAGAAATCCATTACAACAACNNKCTGCCGGGTAACGGTAAATCGAAA |
| P373 | | |
| ERCAS12A- | 584 | /5Phos/TTAGAAATCCATTACAACAACATTNNKCCGGGTAACGGTAAATCGAAAGCG |
| P374 | | |
| ERCAS12A- | 585 | /5Phos/GAAATCCATTACAACAACATTCTGNNKGGTAACGGTAAATCGAAAGCGGAC |
| P375 | | |
| ERCAS12A- | 586 | /5Phos/ATCCATTACAACAACATTCTGCCGNNKAACGGTAAATCGAAAGCGGACAAA |
| P376 | | |
| ERCAS12A- | 587 | /5Phos/CATTACAACAACATTCTGCCGGGTNNKGGTAAATCGAAAGCGGACAAAGTG |
| P377 | | |
| ERCAS12A- | 588 | /5Phos/TACAACAACATTCTGCCGGGTAACNNKAAATCGAAAGCGGACAAAGTGAAG |
| P378 | | |
| ERCAS12A- | 589 | /5Phos/AACAACATTCTGCCGGGTAACGGTNNKTCGAAAGCGGACAAAGTGAAGAAG |
| P379 | | |
| ERCAS12A- | 590 | /5Phos/AACATTCTGCCGGGTAACGGTAAANNKAAAGCGGACAAAGTGAAGAAGGCG |
| P380 | | |
| ERCAS12A- | 591 | /5Phos/ATTCTGCCGGGTAACGGTAAATCGNNKGCGGACAAAGTGAAGAAGGCGGTT |
| P381 | | |
| ERCAS12A- | 592 | /5Phos/CTGCCGGGTAACGGTAAATCGAAANNKGACAAAGTGAAGAAGGCGGTTAAG |
| P382 | | |
| ERCAS12A- | 593 | /5Phos/CCGGGTAACGGTAAATCGAAAGCGNNKAAAGTGAAGAAGGCGGTTAAGAAC |
| P383 | | |
| ERCAS12A- | 594 | /5Phos/GGTAACGGTAAATCGAAAGCGGACNNKGTGAAGAAGGCGGTTAAGAACGAT |
| P384 | | |
| ERCAS12A- | 595 | /5Phos/AACGGTAAATCGAAAGCGGACAAANNKAAGAAGGCGGTTAAGAACGATCTT |
| P385 | | |
| ERCAS12A- | 596 | /5Phos/GGTAAATCGAAAGCGGACAAAGTGNNKAAGGCGGTTAAGAACGATCTTCAG |
| P386 | | |
| ERCAS12A- | 597 | /5Phos/AAATCGAAAGCGGACAAAGTGAAGNNKGCGGTTAAGAACGATCTTCAGAAG |
| P387 | | |
| ERCAS12A- | 598 | /5Phos/TCGAAAGCGGACAAAGTGAAGAAGNNKGTTAAGAACGATCTTCAGAAGTCT |
| P388 | | |
| ERCAS12A- | 599 | /5Phos/AAAGCGGACAAAGTGAAGAAGGCGNNKAAGAACGATCTTCAGAAGTCTATC |
| P389 | | |
| ERCAS12A- | 600 | /5Phos/GCGGACAAAGTGAAGAAGGCGGTTNNKAACGATCTTCAGAAGTCTATCACG |
| P390 | | |
| ERCAS12A- | 601 | /5Phos/GACAAAGTGAAGAAGGCGGTTAAGNNKGATCTTCAGAAGTCTATCACGGAG |
| P391 | | |
| ERCAS12A- | 602 | /5Phos/AAAGTGAAGAAGGCGGTTAAGAACNNKCTTCAGAAGTCTATCACGGAGATT |
| P392 | | |
| ERCAS12A- | 603 | /5Phos/GTGAAGAAGGCGGTTAAGAACGATNNKCAGAAGTCTATCACGGAGATTAAT |
| P393 | | |
| ERCAS12A- | 604 | /5Phos/AAGAAGGCGGTTAAGAACGATCTTNNKAAGTCTATCACGGAGATTAATGAG |
| P394 | | |
| ERCAS12A- | 605 | /5Phos/AAGGCGGTTAAGAACGATCTTCAGNNKTCTATCACGGAGATTAATGAGCTG |
| P395 | | |
| ERCAS12A- | 606 | /5Phos/GCGGTTAAGAACGATCTTCAGAAGNNKATCACGGAGATTAATGAGCTGGTT |
| P396 | | |
| ERCAS12A- | 607 | /5Phos/GTTAAGAACGATCTTCAGAAGTCTNNKACGGAGATTAATGAGCTGGTTTCC |
| P397 | | |
| ERCAS12A- | 608 | /5Phos/AAGAACGATCTTCAGAAGTCTATCNNKGAGATTAATGAGCTGGTTTCCAAT |
| P398 | | |
| ERCAS12A- | 609 | /5Phos/AACGATCTTCAGAAGTCTATCACGNNKATTAATGAGCTGGTTTCCAATTAC |
| P399 | | |
| ERCAS12A- | 610 | /5Phos/GATCTTCAGAAGTCTATCACGGAGNNKAATGAGCTGGTTTCCAATTACAAG |
| P400 | | |
| ERCAS12A- | 611 | /5Phos/CTTCAGAAGTCTATCACGGAGATTNNKGAGCTGGTTTCCAATTACAAGTTG |
| P401 | | |
| ERCAS12A- | 612 | /5Phos/CAGAAGTCTATCACGGAGATTAATNNKCTGGTTTCCAATTACAAGTTGTGC |
| P402 | | |
| ERCAS12A- | 613 | /5Phos/AAGTCTATCACGGAGATTAATGAGNNKGTTTCCAATTACAAGTTGTGCTCG |
| P403 | | |
| ERCAS12A- | 614 | /5Phos/TCTATCACGGAGATTAATGAGCTGNNKTCCAATTACAAGTTGTGCTCGGAT |
| P404 | | |
| ERCAS12A- | 615 | /5Phos/ATCACGGAGATTAATGAGCTGGTTNNKAATTACAAGTTGTGCTCGGATGAT |
| P405 | | |
| ERCAS12A- | 616 | /5Phos/ACGGAGATTAATGAGCTGGTTTCCNNKTACAAGTTGTGCTCGGATGATAAC |
| P406 | | |
| ERCAS12A- | 617 | /5Phos/GAGATTAATGAGCTGGTTTCCAATNNKAAGTTGTGCTCGGATGATAACATC |
| P407 | | |
| ERCAS12A- | 618 | /5Phos/ATTAATGAGCTGGTTTCCAATTACNNKTTGTGCTCGGATGATAACATCAAA |
| P408 | | |
| ERCAS12A- | 619 | /5Phos/AATGAGCTGGTTTCCAATTACAAGNNKTGCTCGGATGATAACATCAAAGCT |
| P409 | | |
| ERCAS12A- | 620 | /5Phos/GAGCTGGTTTCCAATTACAAGTTGNNKTCGGATGATAACATCAAAGCTGAA |
| P410 | | |
| ERCAS12A- | 621 | /5Phos/CTGGTTTCCAATTACAAGTTGTGCNNKGATGATAACATCAAAGCTGAAACC |
| P411 | | |
| ERCAS12A- | 622 | /5Phos/GTTTCCAATTACAAGTTGTGCTCGNNKGATAACATCAAAGCTGAAACCTAT |
| P412 | | |
| ERCAS12A- | 623 | /5Phos/TCCAATTACAAGTTGTGCTCGGATNNKAACATCAAAGCTGAAACCTATATC |
| P413 | | |
| ERCAS12A- | 624 | /5Phos/AATTACAAGTTGTGCTCGGATGATNNKATCAAAGCTGAAACCTATATCCAT |
| P414 | | |
| ERCAS12A- | 625 | /5Phos/TACAAGTTGTGCTCGGATGATAACNNKAAAGCTGAAACCTATATCCATGAA |
| P415 | | |
| ERCAS12A- | 626 | /5Phos/AAGTTGTGCTCGGATGATAACATCNNKGCTGAAACCTATATCCATGAAATT |
| P416 | | |
| ERCAS12A- | 627 | /5Phos/TTGTGCTCGGATGATAACATCAAANNKGAAACCTATATCCATGAAATTTCT |
| P417 | | |
| ERCAS12A- | 628 | /5Phos/TGCTCGGATGATAACATCAAAGCTNNKACCTATATCCATGAAATTTCTCAT |
| P418 | | |
| ERCAS12A- | 629 | /5Phos/TCGGATGATAACATCAAAGCTGAANNKTATATCCATGAAATTTCTCATATT |
| P419 | | |
| ERCAS12A- | 630 | /5Phos/GATGATAACATCAAAGCTGAAACCNNKATCCATGAAATTTCTCATATTCTT |
| P420 | | |
| ERCAS12A- | 631 | /5Phos/GATAACATCAAAGCTGAAACCTATNNKCATGAAATTTCTCATATTCTTAAT |
| P421 | | |
| ERCAS12A- | 632 | /5Phos/AACATCAAAGCTGAAACCTATATCNNKGAAATTTCTCATATTCTTAATAAC |
| P422 | | |
| ERCAS12A- | 633 | /5Phos/ATCAAAGCTGAAACCTATATCCATNNKATTTCTCATATTCTTAATAACTTC |
| P423 | | |
| ERCAS12A- | 634 | /5Phos/AAAGCTGAAACCTATATCCATGAANNKTCTCATATTCTTAATAACTTCGAG |
| P424 | | |
| ERCAS12A- | 635 | /5Phos/GCTGAAACCTATATCCATGAAATTNNKCATATTCTTAATAACTTCGAGGCA |
| P425 | | |
| ERCAS12A- | 636 | /5Phos/GAAACCTATATCCATGAAATTTCTNNKATTCTTAATAACTTCGAGGCACAA |
| P426 | | |
| ERCAS12A- | 637 | /5Phos/ACCTATATCCATGAAATTTCTCATNNKCTTAATAACTTCGAGGCACAAGAA |
| P427 | | |
| ERCAS12A- | 638 | /5Phos/TATATCCATGAAATTTCTCATATTNNKAATAACTTCGAGGCACAAGAATTA |
| P428 | | |
| ERCAS12A- | 639 | /5Phos/ATCCATGAAATTTCTCATATTCTTNNKAACTTCGAGGCACAAGAATTAAAA |
| P429 | | |
| ERCAS12A- | 640 | /5Phos/CATGAAATTTCTCATATTCTTAATNNKTTCGAGGCACAAGAATTAAAATAT |
| P430 | | |
| ERCAS12A- | 641 | /5Phos/GAAATTTCTCATATTCTTAATAACNNKGAGGCACAAGAATTAAAATATAAC |
| P431 | | |
| ERCAS12A- | 642 | /5Phos/ATTTCTCATATTCTTAATAACTTCNNKGCACAAGAATTAAAATATAACCCA |
| P432 | | |
| ERCAS12A- | 643 | /5Phos/TCTCATATTCTTAATAACTTCGAGNNKCAAGAATTAAAATATAACCCAGAA |
| P433 | | |
| ERCAS12A- | 644 | /5Phos/CATATTCTTAATAACTTCGAGGCANNKGAATTAAAATATAACCCAGAAATT |
| P434 | | |
| ERCAS12A- | 645 | /5Phos/ATTCTTAATAACTTCGAGGCACAANNKTTAAAATATAACCCAGAAATTCAT |
| P435 | | |
| ERCAS12A- | 646 | /5Phos/CTTAATAACTTCGAGGCACAAGAANNKAAATATAACCCAGAAATTCATCTG |
| P436 | | |
| ERCAS12A- | 647 | /5Phos/AATAACTTCGAGGCACAAGAATTANNKTATAACCCAGAAATTCATCTGGTT |
| P437 | | |
| ERCAS12A- | 648 | /5Phos/AACTTCGAGGCACAAGAATTAAAANNKAACCCAGAAATTCATCTGGTTGAG |
| P438 | | |
| ERCAS12A- | 649 | /5Phos/TTCGAGGCACAAGAATTAAAATATNNKCCAGAAATTCATCTGGTTGAGAGC |
| P439 | | |
| ERCAS12A- | 650 | /5Phos/GAGGCACAAGAATTAAAATATAACNNKGAAATTCATCTGGTTGAGAGCGAA |
| P440 | | |
| ERCAS12A- | 651 | /5Phos/GCACAAGAATTAAAATATAACCCANNKATTCATCTGGTTGAGAGCGAACTT |
| P441 | | |
| ERCAS12A- | 652 | /5Phos/CAAGAATTAAAATATAACCCAGAANNKCATCTGGTTGAGAGCGAACTTAAA |
| P442 | | |
| ERCAS12A- | 653 | /5Phos/GAATTAAAATATAACCCAGAAATTNNKCTGGTTGAGAGCGAACTTAAAGCT |
| P443 | | |
| ERCAS12A- | 654 | /5Phos/TTAAAATATAACCCAGAAATTCATNNKGTTGAGAGCGAACTTAAAGCTTCA |
| P444 | | |
| ERCAS12A- | 655 | /5Phos/AAATATAACCCAGAAATTCATCTGNNKGAGAGCGAACTTAAAGCTTCAGAA |
| P445 | | |
| ERCAS12A- | 656 | /5Phos/TATAACCCAGAAATTCATCTGGTTNNKAGCGAACTTAAAGCTTCAGAATTA |
| P446 | | |
| ERCAS12A- | 657 | /5Phos/AACCCAGAAATTCATCTGGTTGAGNNKGAACTTAAAGCTTCAGAATTAAAA |
| P447 | | |
| ERCAS12A- | 658 | /5Phos/CCAGAAATTCATCTGGTTGAGAGCNNKCTTAAAGCTTCAGAATTAAAAAAT |
| P448 | | |
| ERCAS12A- | 659 | /5Phos/GAAATTCATCTGGTTGAGAGCGAANNKAAAGCTTCAGAATTAAAAAATGTT |
| P449 | | |
| ERCAS12A- | 660 | /5Phos/ATTCATCTGGTTGAGAGCGAACTTNNKGCTTCAGAATTAAAAAATGTTTTG |
| P450 | | |
| ERCAS12A- | 661 | /5Phos/CATCTGGTTGAGAGCGAACTTAAANNKTCAGAATTAAAAAATGTTTTGGAC |
| P451 | | |
| ERCAS12A- | 662 | /5Phos/CTGGTTGAGAGCGAACTTAAAGCTNNKGAATTAAAAAATGTTTTGGACGTA |
| P452 | | |
| ERCAS12A- | 663 | /5Phos/GTTGAGAGCGAACTTAAAGCTTCANNKTTAAAAAATGTTTTGGACGTAATT |
| P453 | | |
| ERCAS12A- | 664 | /5Phos/GAGAGCGAACTTAAAGCTTCAGAANNKAAAAATGTTTTGGACGTAATTATG |
| P454 | | |
| ERCAS12A- | 665 | /5Phos/AGCGAACTTAAAGCTTCAGAATTANNKAATGTTTTGGACGTAATTATGAAC |
| P455 | | |
| ERCAS12A- | 666 | /5Phos/GAACTTAAAGCTTCAGAATTAAAANNKGTTTTGGACGTAATTATGAACGCC |
| P456 | | |
| ERCAS12A- | 667 | /5Phos/CTTAAAGCTTCAGAATTAAAAAATNNKTTGGACGTAATTATGAACGCCTTC |
| P457 | | |
| ERCAS12A- | 668 | /5Phos/AAAGCTTCAGAATTAAAAAATGTINNKGACGTAATTATGAACGCCTTCCAT |
| P458 | | |
| ERCAS12A- | 669 | /5Phos/GCTTCAGAATTAAAAAATGTTTTGNNKGTAATTATGAACGCCTTCCATTGG |
| P459 | | |
| ERCAS12A- | 670 | /5Phos/TCAGAATTAAAAAATGTTTTGGACNNKATTATGAACGCCTTCCATTGGTGC |
| P460 | | |
| ERCAS12A- | 671 | /5Phos/GAATTAAAAAATGTTTTGGACGTANNKATGAACGCCTTCCATTGGTGCAGC |
| P461 | | |
| ERCAS12A- | 672 | /5Phos/TTAAAAAATGTTTTGGACGTAATTNNKAACGCCTTCCATTGGTGCAGCGTG |
| P462 | | |
| ERCAS12A- | 673 | /5Phos/AAAAATGTTTTGGACGTAATTATGNNKGCCTTCCATTGGTGCAGCGTGTTT |
| P463 | | |
| ERCAS12A- | 674 | /5Phos/AATGTTTTGGACGTAATTATGAACNNKTTCCATTGGTGCAGCGTGTTTATG |
| P464 | | |
| ERCAS12A- | 675 | /5Phos/GTTTTGGACGTAATTATGAACGCCNNKCATTGGTGCAGCGTGTTTATGACA |
| P465 | | |
| ERCAS12A- | 676 | /5Phos/TTGGACGTAATTATGAACGCCTTCNNKTGGTGCAGCGTGTTTATGACAGAG |
| P466 | | |
| ERCAS12A- | 677 | /5Phos/GACGTAATTATGAACGCCTTCCATNNKTGCAGCGTGTTTATGACAGAGGAG |
| P467 | | |
| ERCAS12A- | 678 | /5Phos/GTAATTATGAACGCCTTCCATTGGNNKAGCGTGTTTATGACAGAGGAGTTA |
| P468 | | |
| ERCAS12A- | 679 | /5Phos/ATTATGAACGCCTTCCATTGGTGCNNKGTGTTTATGACAGAGGAGTTAGTA |
| P469 | | |
| ERCAS12A- | 680 | /5Phos/ATGAACGCCTTCCATTGGTGCAGCNNKTTTATGACAGAGGAGTTAGTAGAT |
| P470 | | |
| ERCAS12A- | 681 | /5Phos/AACGCCTTCCATTGGTGCAGCGTGNNKATGACAGAGGAGTTAGTAGATAAG |
| P471 | | |
| ERCAS12A- | 682 | /5Phos/GCCTTCCATTGGTGCAGCGTGTTTNNKACAGAGGAGTTAGTAGATAAGGAT |
| P472 | | |
| ERCAS12A- | 683 | /5Phos/TTCCATTGGTGCAGCGTGTTTATGNNKGAGGAGTTAGTAGATAAGGATAAC |
| P473 | | |
| ERCAS12A- | 684 | /5Phos/CATTGGTGCAGCGTGTTTATGACANNKGAGTTAGTAGATAAGGATAACAAC |
| P474 | | |
| ERCAS12A- | 685 | /5Phos/TGGTGCAGCGTGTTTATGACAGAGNNKTTAGTAGATAAGGATAACAACTTT |
| P475 | | |
| ERCAS12A- | 686 | /5Phos/TGCAGCGTGTTTATGACAGAGGAGNNKGTAGATAAGGATAACAACTTTTAT |
| P476 | | |
| ERCAS12A- | 687 | /5Phos/AGCGTGTTTATGACAGAGGAGTTANNKGATAAGGATAACAACTTTTATGCA |
| P477 | | |
| ERCAS12A- | 688 | /5Phos/GTGTTTATGACAGAGGAGTTAGTANNKAAGGATAACAACTTTTATGCAGAA |
| P478 | | |
| ERCAS12A- | 689 | /5Phos/TTTATGACAGAGGAGTTAGTAGATNNKGATAACAACTTTTATGCAGAATTG |
| P479 | | |
| ERCAS12A- | 690 | /5Phos/ATGACAGAGGAGTTAGTAGATAAGNNKAACAACTTTTATGCAGAATTGGAA |
| P480 | | |
| ERCAS12A- | 691 | /5Phos/ACAGAGGAGTTAGTAGATAAGGATNNKAACTTTTATGCAGAATTGGAAGAG |
| P481 | | |
| ERCAS12A- | 692 | /5Phos/GAGGAGTTAGTAGATAAGGATAACNNKTTTTATGCAGAATTGGAAGAGATC |
| P482 | | |
| ERCAS12A- | 693 | /5Phos/GAGTTAGTAGATAAGGATAACAACNNKTATGCAGAATTGGAAGAGATCTAT |
| P483 | | |
| ERCAS12A- | 694 | /5Phos/TTAGTAGATAAGGATAACAACTTTNNKGCAGAATTGGAAGAGATCTATGAT |
| P484 | | |
| ERCAS12A- | 695 | /5Phos/GTAGATAAGGATAACAACTTTTATNNKGAATTGGAAGAGATCTATGATGAG |
| P485 | | |
| ERCAS12A- | 696 | /5Phos/GATAAGGATAACAACTTTTATGCANNKTTGGAAGAGATCTATGATGAGATC |
| P486 | | |
| ERCAS12A- | 697 | /5Phos/AAGGATAACAACTTTTATGCAGAANNKGAAGAGATCTATGATGAGATCTAT |
| P487 | | |
| ERCAS12A- | 698 | /5Phos/GATAACAACTTTTATGCAGAATTGNNKGAGATCTATGATGAGATCTATCCA |
| P488 | | |
| ERCAS12A- | 699 | /5Phos/AACAACTTTTATGCAGAATTGGAANNKATCTATGATGAGATCTATCCAGTG |
| P489 | | |
| ERCAS12A- | 700 | /5Phos/AACTTTTATGCAGAATTGGAAGAGNNKTATGATGAGATCTATCCAGTGATT |
| P490 | | |
| ERCAS12A- | 701 | /5Phos/TTTTATGCAGAATTGGAAGAGATCNNKGATGAGATCTATCCAGTGATTTCA |
| P491 | | |
| ERCAS12A- | 702 | /5Phos/TATGCAGAATTGGAAGAGATCTATNNKGAGATCTATCCAGTGATTTCACTG |
| P492 | | |
| ERCAS12A- | 703 | /5Phos/GCAGAATTGGAAGAGATCTATGATNNKATCTATCCAGTGATTTCACTGTAT |
| P493 | | |
| ERCAS12A- | 704 | /5Phos/GAATTGGAAGAGATCTATGATGAGNNKTATCCAGTGATTTCACTGTATAAC |
| P494 | | |
| ERCAS12A- | 705 | /5Phos/TTGGAAGAGATCTATGATGAGATCNNKCCAGTGATTTCACTGTATAACTTA |
| P495 | | |
| ERCAS12A- | 706 | /5Phos/GAAGAGATCTATGATGAGATCTATNNKGTGATTTCACTGTATAACTTAGTC |
| P496 | | |
| ERCAS12A- | 707 | /5Phos/GAGATCTATGATGAGATCTATCCANNKATTTCACTGTATAACTTAGTCCGT |
| P497 | | |
| ERCAS12A- | 708 | /5Phos/ATCTATGATGAGATCTATCCAGTGNNKTCACTGTATAACTTAGTCCGTAAT |
| P498 | | |
| ERCAS12A- | 709 | /5Phos/TATGATGAGATCTATCCAGTGATTNNKCTGTATAACTTAGTCCGTAATTAC |
| P499 | | |
| ERCAS12A- | 710 | /5Phos/GATGAGATCTATCCAGTGATTTCANNKTATAACTTAGTCCGTAATTACGTC |
| P500 | | |
| ERCAS12A- | 711 | /5Phos/GAGATCTATCCAGTGATTTCACTGNNKAACTTAGTCCGTAATTACGTCACT |
| P501 | | |
| ERCAS12A- | 712 | /5Phos/ATCTATCCAGTGATTTCACTGTATNNKTTAGTCCGTAATTACGTCACTCAG |
| P502 | | |
| ERCAS12A- | 713 | /5Phos/TATCCAGTGATTTCACTGTATAACNNKGTCCGTAATTACGTCACTCAGAAG |
| P503 | | |
| ERCAS12A- | 714 | /5Phos/CCAGTGATTTCACTGTATAACTTANNKCGTAATTACGTCACTCAGAAGCCG |
| P504 | | |
| ERCAS12A- | 715 | /5Phos/GTGATTTCACTGTATAACTTAGTCNNKAATTACGTCACTCAGAAGCCGTAC |
| P505 | | |
| ERCAS12A- | 716 | /5Phos/ATTTCACTGTATAACTTAGTCCGTNNKTACGTCACTCAGAAGCCGTACTCA |
| P506 | | |
| ERCAS12A- | 717 | /5Phos/TCACTGTATAACTTAGTCCGTAATNNKGTCACTCAGAAGCCGTACTCAACT |
| P507 | | |
| ERCAS12A- | 718 | /5Phos/CTGTATAACTTAGTCCGTAATTACNNKACTCAGAAGCCGTACTCAACTAAA |
| P508 | | |
| ERCAS12A- | 719 | /5Phos/TATAACTTAGTCCGTAATTACGTCNNKCAGAAGCCGTACTCAACTAAAAAG |
| P509 | | |
| ERCAS12A- | 720 | /5Phos/AACTTAGTCCGTAATTACGTCACTNNKAAGCCGTACTCAACTAAAAAGATC |
| P510 | | |
| ERCAS12A- | 721 | /5Phos/TTAGTCCGTAATTACGTCACTCAGNNKCCGTACTCAACTAAAAAGATCAAG |
| P511 | | |
| ERCAS12A- | 722 | /5Phos/GTCCGTAATTACGTCACTCAGAAGNNKTACTCAACTAAAAAGATCAAGTTA |
| P512 | | |
| ERCAS12A- | 723 | /5Phos/CGTAATTACGTCACTCAGAAGCCGNNKTCAACTAAAAAGATCAAGTTAAAT |
| P513 | | |
| ERCAS12A- | 724 | /5Phos/AATTACGTCACTCAGAAGCCGTACNNKACTAAAAAGATCAAGTTAAATTTT |
| P514 | | |
| ERCAS12A- | 725 | /5Phos/TACGTCACTCAGAAGCCGTACTCANNKAAAAAGATCAAGTTAAATTTTGGA |
| P515 | | |
| ERCAS12A- | 726 | /5Phos/GTCACTCAGAAGCCGTACTCAACTNNKAAGATCAAGTTAAATTTTGGAATT |
| P516 | | |
| ERCAS12A- | 727 | /5Phos/ACTCAGAAGCCGTACTCAACTAAANNKATCAAGTTAAATTTTGGAATTCCG |
| P517 | | |
| ERCAS12A- | 728 | /5Phos/CAGAAGCCGTACTCAACTAAAAAGNNKAAGTTAAATTTTGGAATTCCGACA |
| P518 | | |
| ERCAS12A- | 729 | /5Phos/AAGCCGTACTCAACTAAAAAGATCNNKTTAAATTTTGGAATTCCGACATTG |
| P519 | | |
| ERCAS12A- | 730 | /5Phos/CCGTACTCAACTAAAAAGATCAAGNNKAATTTTGGAATTCCGACATTGGCG |
| P520 | | |
| ERCAS12A- | 731 | /5Phos/TACTCAACTAAAAAGATCAAGTTANNKTTTGGAATTCCGACATTGGCGGAT |
| P521 | | |
| ERCAS12A- | 732 | /5Phos/TCAACTAAAAAGATCAAGTTAAATNNKGGAATTCCGACATTGGCGGATGGT |
| P522 | | |
| ERCAS12A- | 733 | /5Phos/ACTAAAAAGATCAAGTTAAATTTTNNKATTCCGACATTGGCGGATGGTTGG |
| P523 | | |
| ERCAS12A- | 734 | /5Phos/AAAAAGATCAAGTTAAATTTTGGANNKCCGACATTGGCGGATGGTTGGAGT |
| P524 | | |
| ERCAS12A- | 735 | /5Phos/AAGATCAAGTTAAATTTTGGAATTNNKACATTGGCGGATGGTTGGAGTAAG |
| P525 | | |
| ERCAS12A- | 736 | /5Phos/ATCAAGTTAAATTTTGGAATTCCGNNKTTGGCGGATGGTTGGAGTAAGTCT |
| P526 | | |
| ERCAS12A- | 737 | /5Phos/AAGTTAAATTTTGGAATTCCGACANNKGCGGATGGTTGGAGTAAGTCTAAG |
| P527 | | |
| ERCAS12A- | 738 | /5Phos/TTAAATTTTGGAATTCCGACATTGNNKGATGGTTGGAGTAAGTCTAAGGAA |
| P528 | | |
| ERCAS12A- | 739 | /5Phos/AATTTTGGAATTCCGACATTGGCGNNKGGTTGGAGTAAGTCTAAGGAATAC |
| P529 | | |
| ERCAS12A- | 740 | /5Phos/TTTGGAATTCCGACATTGGCGGATNNKTGGAGTAAGTCTAAGGAATACTCA |
| P530 | | |
| ERCAS12A- | 741 | /5Phos/GGAATTCCGACATTGGCGGATGGTNNKAGTAAGTCTAAGGAATACTCAAAT |
| P531 | | |
| ERCAS12A- | 742 | /5Phos/ATTCCGACATTGGCGGATGGTTGGNNKAAGTCTAAGGAATACTCAAATAAC |
| P532 | | |
| ERCAS12A- | 743 | /5Phos/CCGACATTGGCGGATGGTTGGAGTNNKTCTAAGGAATACTCAAATAACGCT |
| P533 | | |
| ERCAS12A- | 744 | /5Phos/ACATTGGCGGATGGTTGGAGTAAGNNKAAGGAATACTCAAATAACGCTATT |
| P534 | | |
| ERCAS12A- | 745 | /5Phos/TTGGCGGATGGTTGGAGTAAGTCTNNKGAATACTCAAATAACGCTATTATC |
| P535 | | |
| ERCAS12A- | 746 | /5Phos/GCGGATGGTTGGAGTAAGTCTAAGNNKTACTCAAATAACGCTATTATCTTA |
| P536 | | |
| ERCAS12A- | 747 | /5Phos/GATGGTTGGAGTAAGTCTAAGGAANNKTCAAATAACGCTATTATCTTAATG |
| P537 | | |
| ERCAS12A- | 748 | /5Phos/GGTTGGAGTAAGTCTAAGGAATACNNKAATAACGCTATTATCTTAATGCGT |
| P538 | | |
| ERCAS12A- | 749 | /5Phos/TGGAGTAAGTCTAAGGAATACTCANNKAACGCTATTATCTTAATGCGTGAC |
| P539 | | |
| ERCAS12A- | 750 | /5Phos/AGTAAGTCTAAGGAATACTCAAATNNKGCTATTATCTTAATGCGTGACAAC |
| P540 | | |
| ERCAS12A- | 751 | /5Phos/AAGTCTAAGGAATACTCAAATAACNNKATTATCTTAATGCGTGACAACCTG |
| P541 | | |
| ERCAS12A- | 752 | /5Phos/TCTAAGGAATACTCAAATAACGCTNNKATCTTAATGCGTGACAACCTGTAT |
| P542 | | |
| ERCAS12A- | 753 | /5Phos/AAGGAATACTCAAATAACGCTATTNNKTTAATGCGTGACAACCTGTATTAC |
| P543 | | |
| ERCAS12A- | 754 | /5Phos/GAATACTCAAATAACGCTATTATCNNKATGCGTGACAACCTGTATTACTTG |
| P544 | | |
| ERCAS12A- | 755 | /5Phos/TACTCAAATAACGCTATTATCTTANNKCGTGACAACCTGTATTACTTGGGT |
| P545 | | |
| ERCAS12A- | 756 | /5Phos/TCAAATAACGCTATTATCTTAATGNNKGACAACCTGTATTACTTGGGTATT |
| P546 | | |
| ERCAS12A- | 757 | /5Phos/AATAACGCTATTATCTTAATGCGTNNKAACCTGTATTACTTGGGTATTTTC |
| P547 | | |
| ERCAS12A- | 758 | /5Phos/AACGCTATTATCTTAATGCGTGACNNKCTGTATTACTTGGGTATTTTCAAT |
| P548 | | |
| ERCAS12A- | 759 | /5Phos/GCTATTATCTTAATGCGTGACAACNNKTATTACTTGGGTATTTTCAATGCC |
| P549 | | |
| ERCAS12A- | 760 | /5Phos/ATTATCTTAATGCGTGACAACCTGNNKTACTTGGGTATTTTCAATGCCAAA |
| P550 | | |
| ERCAS12A- | 761 | /5Phos/ATCTTAATGCGTGACAACCTGTATNNKTTGGGTATTTTCAATGCCAAAAAT |
| P551 | | |
| ERCAS12A- | 762 | /5Phos/TTAATGCGTGACAACCTGTATTACNNKGGTATTTTCAATGCCAAAAATAAG |
| P552 | | |
| ERCAS12A- | 763 | /5Phos/ATGCGTGACAACCTGTATTACTTGNNKATTTTCAATGCCAAAAATAAGCCC |
| P553 | | |
| ERCAS12A- | 764 | /5Phos/CGTGACAACCTGTATTACTTGGGTNNKTTCAATGCCAAAAATAAGCCCGAT |
| P554 | | |
| ERCAS12A- | 765 | /5Phos/GACAACCTGTATTACTTGGGTATTNNKAATGCCAAAAATAAGCCCGATAAA |
| P555 | | |
| ERCAS12A- | 766 | /5Phos/AACCTGTATTACTTGGGTATTTTCNNKGCCAAAAATAAGCCCGATAAAAAA |
| P556 | | |
| ERCAS12A- | 767 | /5Phos/CTGTATTACTTGGGTATTTTCAATNNKAAAAATAAGCCCGATAAAAAAATC |
| P557 | | |
| ERCAS12A- | 768 | /5Phos/TATTACTTGGGTATTTTCAATGCCNNKAATAAGCCCGATAAAAAAATCATT |
| P558 | | |
| ERCAS12A- | 769 | /5Phos/TACTTGGGTATTTTCAATGCCAAANNKAAGCCCGATAAAAAAATCATTGAA |
| P559 | | |
| ERCAS12A- | 770 | /5Phos/TTGGGTATTTTCAATGCCAAAAATNNKCCCGATAAAAAAATCATTGAAGGG |
| P560 | | |
| ERCAS12A- | 771 | /5Phos/GGTATTTTCAATGCCAAAAATAAGNNKGATAAAAAAATCATTGAAGGGAAT |
| P561 | | |
| ERCAS12A- | 772 | /5Phos/ATTTTCAATGCCAAAAATAAGCCCNNKAAAAAAATCATTGAAGGGAATACT |
| P562 | | |
| ERCAS12A- | 773 | /5Phos/TTCAATGCCAAAAATAAGCCCGATNNKAAAATCATTGAAGGGAATACTTCA |
| P563 | | |
| ERCAS12A- | 774 | /5Phos/AATGCCAAAAATAAGCCCGATAAANNKATCATTGAAGGGAATACTTCAGAA |
| P564 | | |
| ERCAS12A- | 775 | /5Phos/GCCAAAAATAAGCCCGATAAAAAANNKATTGAAGGGAATACTTCAGAAAAT |
| P565 | | |
| ERCAS12A- | 776 | /5Phos/AAAAATAAGCCCGATAAAAAAATCNNKGAAGGGAATACTTCAGAAAATAAG |
| P566 | | |
| ERCAS12A- | 777 | /5Phos/AATAAGCCCGATAAAAAAATCATTNNKGGGAATACTTCAGAAAATAAGGGA |
| P567 | | |
| ERCAS12A- | 778 | /5Phos/AAGCCCGATAAAAAAATCATTGAANNKAATACTTCAGAAAATAAGGGAGAT |
| P568 | | |
| ERCAS12A- | 779 | /5Phos/CCCGATAAAAAAATCATTGAAGGGNNKACTTCAGAAAATAAGGGAGATTAC |
| P569 | | |
| ERCAS12A- | 780 | /5Phos/GATAAAAAAATCATTGAAGGGAATNNKTCAGAAAATAAGGGAGATTACAAA |
| P570 | | |
| ERCAS12A- | 781 | /5Phos/AAAAAAATCATTGAAGGGAATACTNNKGAAAATAAGGGAGATTACAAAAAA |
| P571 | | |
| ERCAS12A | 782 | /5Phos/AAAATCATTGAAGGGAATACTTCANNKAATAAGGGAGATTACAAAAAAATG |
| P572 | | |
| ERCAS12A- | 783 | /5Phos/ATCATTGAAGGGAATACTTCAGAANNKAAGGGAGATTACAAAAAAATGATT |
| P573 | | |
| ERCAS12A- | 784 | /5Phos/ATTGAAGGGAATACTTCAGAAAATNNKGGAGATTACAAAAAAATGATTTAT |
| P574 | | |
| ERCAS12A- | 785 | /5Phos/GAAGGGAATACTTCAGAAAATAAGNNKGATTACAAAAAAATGATTTATAAC |
| P575 | | |
| ERCAS12A- | 786 | /5Phos/GGGAATACTTCAGAAAATAAGGGANNKTACAAAAAAATGATTTATAACCTT |
| P576 | | |
| ERCAS12A- | 787 | /5Phos/AATACTTCAGAAAATAAGGGAGATNNKAAAAAAATGATTTATAACCTTTTG |
| P577 | | |
| ERCAS12A- | 788 | /5Phos/ACTTCAGAAAATAAGGGAGATTACNNKAAAATGATTTATAACCTTTTGCCA |
| P578 | | |
| ERCAS12A- | 789 | /5Phos/TCAGAAAATAAGGGAGATTACAAANNKATGATTTATAACCTTTTGCCAGGC |
| P579 | | |
| ERCAS12A- | 790 | /5Phos/GAAAATAAGGGAGATTACAAAAAANNKATTTATAACCTTTTGCCAGGCCCA |
| P580 | | |
| ERCAS12A | 791 | /5Phos/AATAAGGGAGATTACAAAAAAATGNNKTATAACCTTTTGCCAGGCCCAAAC |
| P581 | | |
| ERCAS12A- | 792 | /5Phos/AAGGGAGATTACAAAAAAATGATTNNKAACCTTTTGCCAGGCCCAAACAAA |
| P582 | | |
| ERCAS12A- | 793 | /5Phos/GGAGATTACAAAAAAATGATTTATNNKCTTTTGCCAGGCCCAAACAAAATG |
| P583 | | |
| ERCAS12A- | 794 | /5Phos/GATTACAAAAAAATGATTTATAACNNKTTGCCAGGCCCAAACAAAATGATC |
| P584 | | |
| ERCAS12A- | 795 | /5Phos/TACAAAAAAATGATTTATAACCTTNNKCCAGGCCCAAACAAAATGATCCCC |
| P585 | | |
| ERCAS12A- | 796 | /5Phos/AAAAAAATGATTTATAACCTTTTGNNKGGCCCAAACAAAATGATCCCCAAG |
| P586 | | |
| ERCAS12A- | 797 | /5Phos/AAAATGATTTATAACCTTTTGCCANNKCCAAACAAAATGATCCCCAAGGTG |
| P587 | | |
| ERCAS12A- | 798 | /5Phos/ATGATTTATAACCTTTTGCCAGGCNNKAACAAAATGATCCCCAAGGTGTTT |
| P588 | | |
| ERCAS12A- | 799 | /5Phos/ATTTATAACCTTTTGCCAGGCCCANNKAAAATGATCCCCAAGGTGTTTTTG |
| P589 | | |
| ERCAS12A- | 800 | /5Phos/TATAACCTTTTGCCAGGCCCAAACNNKATGATCCCCAAGGTGTTTTTGAGT |
| P590 | | |
| ERCAS12A- | 801 | /5Phos/AACCTTTTGCCAGGCCCAAACAAANNKATCCCCAAGGTGTTTTTGAGTAGT |
| P591 | | |
| ERCAS12A- | 802 | /5Phos/CTTTTGCCAGGCCCAAACAAAATGNNKCCCAAGGTGTTTTTGAGTAGTAAG |
| P592 | | |
| ERCAS12A- | 803 | /5Phos/TTGCCAGGCCCAAACAAAATGATCNNKAAGGTGTTTTTGAGTAGTAAGACG |
| P593 | | |
| ERCAS12A- | 804 | /5Phos/CCAGGCCCAAACAAAATGATCCCCNNKGTGTTTTTGAGTAGTAAGACGGGA |
| P594 | | |
| ERCAS12A- | 805 | /5Phos/GGCCCAAACAAAATGATCCCCAAGNNKTTTTTGAGTAGTAAGACGGGAGTA |
| P595 | | |
| ERCAS12A- | 806 | /5Phos/CCAAACAAAATGATCCCCAAGGTGNNKTTGAGTAGTAAGACGGGAGTAGAA |
| P596 | | |
| ERCAS12A- | 807 | /5Phos/AACAAAATGATCCCCAAGGTGTTTNNKAGTAGTAAGACGGGAGTAGAAACA |
| P597 | | |
| ERCAS12A- | 808 | /5Phos/AAAATGATCCCCAAGGTGTTTTTGNNKAGTAAGACGGGAGTAGAAACATAT |
| P598 | | |
| ERCAS12A- | 809 | /5Phos/ATGATCCCCAAGGTGTTTTTGAGTNNKAAGACGGGAGTAGAAACATATAAG |
| P599 | | |
| ERCAS12A- | 810 | /5Phos/ATCCCCAAGGTGTTTTTGAGTAGTNNKACGGGAGTAGAAACATATAAGCCA |
| P600 | | |
| ERCAS12A- | 811 | /5Phos/CCCAAGGTGTTTTTGAGTAGTAAGNNKGGAGTAGAAACATATAAGCCATCA |
| P601 | | |
| ERCAS12A- | 812 | /5Phos/AAGGTGTTTTTGAGTAGTAAGACGNNKGTAGAAACATATAAGCCATCAGCG |
| P602 | | |
| ERCAS12A- | 813 | /5Phos/GTGTTTTTGAGTAGTAAGACGGGANNKGAAACATATAAGCCATCAGCGTAC |
| P603 | | |
| ERCAS12A- | 814 | /5Phos/TTTTTGAGTAGTAAGACGGGAGTANNKACATATAAGCCATCAGCGTACATT |
| P604 | | |
| ERCAS12A- | 815 | /5Phos/TTGAGTAGTAAGACGGGAGTAGAANNKTATAAGCCATCAGCGTACATTCTT |
| P605 | | |
| ERCAS12A- | 816 | /5Phos/AGTAGTAAGACGGGAGTAGAAACANNKAAGCCATCAGCGTACATTCTTGAA |
| P606 | | |
| ERCAS12A- | 817 | /5Phos/AGTAAGACGGGAGTAGAAACATATNNKCCATCAGCGTACATTCTTGAAGGG |
| P607 | | |
| ERCAS12A- | 818 | /5Phos/AAGACGGGAGTAGAAACATATAAGNNKTCAGCGTACATTCTTGAAGGGTAC |
| P608 | | |
| ERCAS12A- | 819 | /5Phos/ACGGGAGTAGAAACATATAAGCCANNKGCGTACATTCTTGAAGGGTACAAA |
| P609 | | |
| ERCAS12A- | 820 | /5Phos/GGAGTAGAAACATATAAGCCATCANNKTACATTCTTGAAGGGTACAAACAA |
| P610 | | |
| ERCAS12A- | 821 | /5Phos/GTAGAAACATATAAGCCATCAGCGNNKATTCTTGAAGGGTACAAACAAAAT |
| P611 | | |
| ERCAS12A- | 822 | /5Phos/GAAACATATAAGCCATCAGCGTACNNKCTTGAAGGGTACAAACAAAATAAA |
| P612 | | |
| ERCAS12A- | 823 | /5Phos/ACATATAAGCCATCAGCGTACATTNNKGAAGGGTACAAACAAAATAAACAC |
| P613 | | |
| ERCAS12A- | 824 | /5Phos/TATAAGCCATCAGCGTACATTCTTNNKGGGTACAAACAAAATAAACACATC |
| P614 | | |
| ERCAS12A- | 825 | /5Phos/AAGCCATCAGCGTACATTCTTGAANNKTACAAACAAAATAAACACATCAAG |
| P615 | | |
| ERCAS12A- | 826 | /5Phos/CCATCAGCGTACATTCTTGAAGGGNNKAAACAAAATAAACACATCAAGAGC |
| P616 | | |
| ERCAS12A- | 827 | /5Phos/TCAGCGTACATTCTTGAAGGGTACNNKCAAAATAAACACATCAAGAGCAGC |
| P617 | | |
| ERCAS12A- | 828 | /5Phos/GCGTACATTCTTGAAGGGTACAAANNKAATAAACACATCAAGAGCAGCAAG |
| P618 | | |
| ERCAS12A- | 829 | /5Phos/TACATTCTTGAAGGGTACAAACAANNKAAACACATCAAGAGCAGCAAGGAC |
| P619 | | |
| ERCAS12A- | 830 | /5Phos/ATTCTTGAAGGGTACAAACAAAATNNKCACATCAAGAGCAGCAAGGACTTT |
| P620 | | |
| ERCAS12A- | 831 | /5Phos/CTTGAAGGGTACAAACAAAATAAANNKATCAAGAGCAGCAAGGACTTTGAC |
| P621 | | |
| ERCAS12A- | 832 | /5Phos/GAAGGGTACAAACAAAATAAACACNNKAAGAGCAGCAAGGACTTTGACATT |
| P622 | | |
| ERCAS12A- | 833 | /5Phos/GGGTACAAACAAAATAAACACATCNNKAGCAGCAAGGACTTTGACATTACA |
| P623 | | |
| ERCAS12A- | 834 | /5Phos/TACAAACAAAATAAACACATCAAGNNKAGCAAGGACTTTGACATTACATTT |
| P624 | | |
| ERCAS12A- | 835 | /5Phos/AAACAAAATAAACACATCAAGAGCNNKAAGGACTTTGACATTACATTTTGT |
| P625 | | |
| ERCAS12A- | 836 | /5Phos/CAAAATAAACACATCAAGAGCAGCNNKGACTTTGACATTACATTTTGTCAT |
| P626 | | |
| ERCAS12A- | 837 | /5Phos/AATAAACACATCAAGAGCAGCAAGNNKTTTGACATTACATTTTGTCATGAC |
| P627 | | |
| ERCAS12A- | 838 | /5Phos/AAACACATCAAGAGCAGCAAGGACNNKGACATTACATTTTGTCATGACTTA |
| P628 | | |
| ERCAS12A- | 839 | /5Phos/CACATCAAGAGCAGCAAGGACTTTNNKATTACATTTTGTCATGACTTAATC |
| P629 | | |
| ERCAS12A- | 840 | /5Phos/ATCAAGAGCAGCAAGGACTTTGACNNKACATTTTGTCATGACTTAATCGAC |
| P630 | | |
| ERCAS12A- | 841 | /5Phos/AAGAGCAGCAAGGACTTTGACATTNNKTTTTGTCATGACTTAATCGACTAC |
| P631 | | |
| ERCAS12A- | 842 | /5Phos/AGCAGCAAGGACTTTGACATTACANNKTGTCATGACTTAATCGACTACTTT |
| P632 | | |
| ERCAS12A- | 843 | /5Phos/AGCAAGGACTTTGACATTACATTTNNKCATGACTTAATCGACTACTTTAAA |
| P633 | | |
| ERCAS12A- | 844 | /5Phos/AAGGACTTTGACATTACATTTTGTNNKGACTTAATCGACTACTTTAAAAAT |
| P634 | | |
| ERCAS12A- | 845 | /5Phos/GACTTTGACATTACATTTTGTCATNNKTTAATCGACTACTTTAAAAATTGC |
| P635 | | |
| ERCAS12A- | 846 | /5Phos/TTTGACATTACATTTTGTCATGACNNKATCGACTACTTTAAAAATTGCATT |
| P636 | | |
| ERCAS12A- | 847 | /5Phos/GACATTACATTTTGTCATGACTTANNKGACTACTTTAAAAATTGCATTGCC |
| P637 | | |
| ERCAS12A- | 848 | /5Phos/ATTACATTTTGTCATGACTTAATCNNKTACTTTAAAAATTGCATTGCCATT |
| P638 | | |
| ERCAS12A- | 849 | /5Phos/ACATTTTGTCATGACTTAATCGACNNKTTTAAAAATTGCATTGCCATTCAC |
| P639 | | |
| ERCAS12A- | 850 | /5Phos/TTTTGTCATGACTTAATCGACTACNNKAAAAATTGCATTGCCATTCACCCT |
| P640 | | |
| ERCAS12A- | 851 | /5Phos/TGTCATGACTTAATCGACTACTTTNNKAATTGCATTGCCATTCACCCTGAG |
| P641 | | |
| ERCAS12A- | 852 | /5Phos/CATGACTTAATCGACTACTTTAAANNKTGCATTGCCATTCACCCTGAGTGG |
| P642 | | |
| ERCAS12A- | 853 | /5Phos/GACTTAATCGACTACTTTAAAAATNNKATTGCCATTCACCCTGAGTGGAAA |
| P643 | | |
| ERCAS12A- | 854 | /5Phos/TTAATCGACTACTTTAAAAATTGCNNKGCCATTCACCCTGAGTGGAAAAAT |
| P644 | | |
| ERCAS12A- | 855 | /5Phos/ATCGACTACTTTAAAAATTGCATTNNKATTCACCCTGAGTGGAAAAATTTT |
| P645 | | |
| ERCAS12A- | 856 | /5Phos/GACTACTTTAAAAATTGCATTGCCNNKCACCCTGAGTGGAAAAATTTTGGT |
| P646 | | |
| ERCAS12A- | 857 | /5Phos/TACTTTAAAAATTGCATTGCCATTNNKCCTGAGTGGAAAAATTTTGGTTTC |
| P647 | | |
| ERCAS12A- | 858 | /5Phos/TTTAAAAATTGCATTGCCATTCACNNKGAGTGGAAAAATTTTGGTTTCGAC |
| P648 | | |
| ERCAS12A- | 859 | /5Phos/AAAAATTGCATTGCCATTCACCCTNNKTGGAAAAATTTTGGTTTCGACTTC |
| P649 | | |
| ERCAS12A- | 860 | /5Phos/AATTGCATTGCCATTCACCCTGAGNNKAAAAATTTTGGTTTCGACTTCAGT |
| P650 | | |
| ERCAS12A- | 861 | /5Phos/TGCATTGCCATTCACCCTGAGTGGNNKAATTTTGGTTTCGACTTCAGTGAT |
| P651 | | |
| ERCAS12A- | 862 | /5Phos/ATTGCCATTCACCCTGAGTGGAAANNKTTTGGTTTCGACTTCAGTGATACC |
| P652 | | |
| ERCAS12A- | 863 | /5Phos/GCCATTCACCCTGAGTGGAAAAATNNKGGTTTCGACTTCAGTGATACCTCT |
| P653 | | |
| ERCAS12A- | 864 | /5Phos/ATTCACCCTGAGTGGAAAAATTTTNNKTTCGACTTCAGTGATACCTCTACC |
| P654 | | |
| ERCAS12A- | 865 | /5Phos/CACCCTGAGTGGAAAAATTTTGGTNNKGACTTCAGTGATACCTCTACCTAT |
| P655 | | |
| ERCAS12A- | 866 | /5Phos/CCTGAGTGGAAAAATTTTGGTTTCNNKTTCAGTGATACCTCTACCTATGAA |
| P656 | | |
| ERCAS12A- | 867 | /5Phos/GAGTGGAAAAATTTTGGTTTCGACNNKAGTGATACCTCTACCTATGAAGAT |
| P657 | | |
| ERCAS12A- | 868 | /5Phos/TGGAAAAATTTTGGTTTCGACTTCNNKGATACCTCTACCTATGAAGATATC |
| P658 | | |
| ERCAS12A- | 869 | /5Phos/AAAAATTTTGGTTTCGACTTCAGTNNKACCTCTACCTATGAAGATATCTCT |
| P659 | | |
| ERCAS12A- | 870 | /5Phos/AATTTTGGTTTCGACTTCAGTGATNNKTCTACCTATGAAGATATCTCTGGT |
| P660 | | |
| ERCAS12A- | 871 | /5Phos/TTTGGTTTCGACTTCAGTGATACCNNKACCTATGAAGATATCTCTGGTTTT |
| P661 | | |
| ERCAS12A- | 872 | /5Phos/GGTTTCGACTTCAGTGATACCTCTNNKTATGAAGATATCTCTGGTTTTTAT |
| P662 | | |
| ERCAS12A- | 873 | /5Phos/TTCGACTTCAGTGATACCTCTACCNNKGAAGATATCTCTGGTTTTTATCGT |
| P663 | | |
| ERCAS12A- | 874 | /5Phos/GACTTCAGTGATACCTCTACCTATNNKGATATCTCTGGTTTTTATCGTGAG |
| P664 | | |
| ERCAS12A- | 875 | /5Phos/TTCAGTGATACCTCTACCTATGAANNKATCTCTGGTTTTTATCGTGAGGTA |
| P665 | | |
| ERCAS12A- | 876 | /5Phos/AGTGATACCTCTACCTATGAAGATNNKTCTGGTTTTTATCGTGAGGTAGAA |
| P666 | | |
| ERCAS12A- | 877 | /5Phos/GATACCTCTACCTATGAAGATATCNNKGGTTTTTATCGTGAGGTAGAACTT |
| P667 | | |
| ERCAS12A- | 878 | /5Phos/ACCTCTACCTATGAAGATATCTCTNNKTTTTATCGTGAGGTAGAACTTCAG |
| P668 | | |
| ERCAS12A- | 879 | /5Phos/TCTACCTATGAAGATATCTCTGGTNNKTATCGTGAGGTAGAACTTCAGGGT |
| P669 | | |
| ERCAS12A- | 880 | /5Phos/ACCTATGAAGATATCTCTGGTTTTNNKCGTGAGGTAGAACTTCAGGGTTAC |
| P670 | | |
| ERCAS12A- | 881 | /5Phos/TATGAAGATATCTCTGGTTTTTATNNKGAGGTAGAACTTCAGGGTTACAAG |
| P671 | | |
| ERCAS12A- | 882 | /5Phos/GAAGATATCTCTGGTTTTTATCGTNNKGTAGAACTTCAGGGTTACAAGATC |
| P672 | | |
| ERCAS12A- | 883 | /5Phos/GATATCTCTGGTTTTTATCGTGAGNNKGAACTTCAGGGTTACAAGATCGAT |
| P673 | | |
| ERCAS12A- | 884 | /5Phos/ATCTCTGGTTTTTATCGTGAGGTANNKCTTCAGGGTTACAAGATCGATTGG |
| P674 | | |
| ERCAS12A- | 885 | /5Phos/TCTGGTTTTTATCGTGAGGTAGAANNKCAGGGTTACAAGATCGATTGGACG |
| P675 | | |
| ERCAS12A- | 886 | /5Phos/GGTTTTTATCGTGAGGTAGAACTTNNKGGTTACAAGATCGATTGGACGTAC |
| P676 | | |
| ERCAS12A- | 887 | /5Phos/TTTTATCGTGAGGTAGAACTTCAGNNKTACAAGATCGATTGGACGTACATT |
| P677 | | |
| ERCAS12A- | 888 | /5Phos/TATCGTGAGGTAGAACTTCAGGGTNNKAAGATCGATTGGACGTACATTTCC |
| P678 | | |
| ERCAS12A- | 889 | /5Phos/CGTGAGGTAGAACTTCAGGGTTACNNKATCGATTGGACGTACATTTCCGAG |
| P679 | | |
| ERCAS12A- | 890 | /5Phos/GAGGTAGAACTTCAGGGTTACAAGNNKGATTGGACGTACATTTCCGAGAAA |
| P680 | | |
| ERCAS12A- | 891 | /5Phos/GTAGAACTTCAGGGTTACAAGATCNNKTGGACGTACATTTCCGAGAAAGAC |
| P681 | | |
| ERCAS12A- | 892 | /5Phos/GAACTTCAGGGTTACAAGATCGATNNKACGTACATTTCCGAGAAAGACATT |
| P682 | | |
| ERCAS12A- | 893 | /5Phos/CTTCAGGGTTACAAGATCGATTGGNNKTACATTTCCGAGAAAGACATTGAT |
| P683 | | |
| ERCAS12A- | 894 | /5Phos/CAGGGTTACAAGATCGATTGGACGNNKATTTCCGAGAAAGACATTGATCTT |
| P684 | | |
| ERCAS12A- | 895 | /5Phos/GGTTACAAGATCGATTGGACGTACNNKTCCGAGAAAGACATTGATCTTTTA |
| P685 | | |
| ERCAS12A- | 896 | /5Phos/TACAAGATCGATTGGACGTACATTNNKGAGAAAGACATTGATCTTTTACAA |
| P686 | | |
| ERCAS12A- | 897 | /5Phos/AAGATCGATTGGACGTACATTTCCNNKAAAGACATTGATCTTTTACAAGAG |
| P687 | | |
| ERCAS12A- | 898 | /5Phos/ATCGATTGGACGTACATTTCCGAGNNKGACATTGATCTTTTACAAGAGAAG |
| P688 | | |
| ERCAS12A- | 899 | /5Phos/GATTGGACGTACATTTCCGAGAAANNKATTGATCTTTTACAAGAGAAGGGT |
| P689 | | |
| ERCAS12A- | 900 | /5Phos/TGGACGTACATTTCCGAGAAAGACNNKGATCTTTTACAAGAGAAGGGTCAG |
| P690 | | |
| ERCAS12A- | 901 | /5Phos/ACGTACATTTCCGAGAAAGACATTNNKCTTTTACAAGAGAAGGGTCAGCTT |
| P691 | | |
| ERCAS12A- | 902 | /5Phos/TACATTTCCGAGAAAGACATTGATNNKTTACAAGAGAAGGGTCAGCTTTAC |
| P692 | | |
| ERCAS12A- | 903 | /5Phos/ATTTCCGAGAAAGACATTGATCTTNNKCAAGAGAAGGGTCAGCTTTACTTA |
| P693 | | |
| ERCAS12A- | 904 | /5Phos/TCCGAGAAAGACATTGATCTTTTANNKGAGAAGGGTCAGCTTTACTTATTT |
| P694 | | |
| ERCAS12A- | 905 | /5Phos/GAGAAAGACATTGATCTTTTACAANNKAAGGGTCAGCTTTACTTATTTCAG |
| P695 | | |
| ERCAS12A- | 906 | /5Phos/AAAGACATTGATCTTTTACAAGAGNNKGGTCAGCTTTACTTATTTCAGATC |
| P696 | | |
| ERCAS12A- | 907 | /5Phos/GACATTGATCTTTTACAAGAGAAGNNKCAGCTTTACTTATTTCAGATCTAC |
| P697 | | |
| ERCAS12A- | 908 | /5Phos/ATTGATCTTTTACAAGAGAAGGGTNNKCTTTACTTATTTCAGATCTACAAT |
| P698 | | |
| ERCAS12A- | 909 | /5Phos/GATCTTTTACAAGAGAAGGGTCAGNNKTACTTATTTCAGATCTACAATAAA |
| P699 | | |
| ERCAS12A- | 910 | /5Phos/CTTTTACAAGAGAAGGGTCAGCTTNNKTTATTTCAGATCTACAATAAAGAC |
| P700 | | |
| ERCAS12A- | 911 | /5Phos/TTACAAGAGAAGGGTCAGCTTTACNNKTTTCAGATCTACAATAAAGACTTT |
| P701 | | |
| ERCAS12A- | 912 | /5Phos/CAAGAGAAGGGTCAGCTTTACTTANNKCAGATCTACAATAAAGACTTTTCG |
| P702 | | |
| ERCAS12A- | 913 | /5Phos/GAGAAGGGTCAGCTTTACTTATTTNNKATCTACAATAAAGACTTTTCGAAA |
| P703 | | |
| ERCAS12A- | 914 | /5Phos/AAGGGTCAGCTTTACTTATTTCAGNNKTACAATAAAGACTTTTCGAAAAAA |
| P704 | | |
| ERCAS12A- | 915 | /5Phos/GGTCAGCTTTACTTATTTCAGATCNNKAATAAAGACTTTTCGAAAAAATCC |
| P705 | | |
| ERCAS12A- | 916 | /5Phos/CAGCTTTACTTATTTCAGATCTACNNKAAAGACTTTTCGAAAAAATCCACG |
| P706 | | |
| ERCAS12A- | 917 | /5Phos/CTTTACTTATTTCAGATCTACAATNNKGACTTTTCGAAAAAATCCACGGGC |
| P707 | | |
| ERCAS12A- | 918 | /5Phos/TACTTATTTCAGATCTACAATAAANNKTTTTCGAAAAAATCCACGGGCAAC |
| P708 | | |
| ERCAS12A- | 919 | /5Phos/TTATTTCAGATCTACAATAAAGACNNKTCGAAAAAATCCACGGGCAACGAC |
| P709 | | |
| ERCAS12A- | 920 | /5Phos/TTTCAGATCTACAATAAAGACTTTNNKAAAAAATCCACGGGCAACGACAAC |
| P710 | | |
| ERCAS12A- | 921 | /5Phos/CAGATCTACAATAAAGACTTTTCGNNKAAATCCACGGGCAACGACAACCTT |
| P711 | | |
| ERCAS12A- | 922 | /5Phos/ATCTACAATAAAGACTTTTCGAAANNKTCCACGGGCAACGACAACCTTCAT |
| P712 | | |
| ERCAS12A- | 923 | /5Phos/TACAATAAAGACTTTTCGAAAAAANNKACGGGCAACGACAACCTTCATACA |
| P713 | | |
| ERCAS12A- | 924 | /5Phos/AATAAAGACTTTTCGAAAAAATCCNNKGGCAACGACAACCTTCATACAATG |
| P714 | | |
| ERCAS12A- | 925 | /5Phos/AAAGACTTTTCGAAAAAATCCACGNNKAACGACAACCTTCATACAATGTAC |
| P715 | | |
| ERCAS12A- | 926 | /5Phos/GACTTTTCGAAAAAATCCACGGGCNNKGACAACCTTCATACAATGTACTTA |
| P716 | | |
| ERCAS12A- | 927 | /5Phos/TTTTCGAAAAAATCCACGGGCAACNNKAACCTTCATACAATGTACTTAAAG |
| P717 | | |
| ERCAS12A- | 928 | /5Phos/TCGAAAAAATCCACGGGCAACGACNNKCTTCATACAATGTACTTAAAGAAC |
| P718 | | |
| ERCAS12A- | 929 | /5Phos/AAAAAATCCACGGGCAACGACAACNNKCATACAATGTACTTAAAGAACCTG |
| P719 | | |
| ERCAS12A- | 930 | /5Phos/AAATCCACGGGCAACGACAACCTTNNKACAATGTACTTAAAGAACCTGTTC |
| P720 | | |
| ERCAS12A- | 931 | /5Phos/TCCACGGGCAACGACAACCTTCATNNKATGTACTTAAAGAACCTGTTCTCT |
| P721 | | |
| ERCAS12A- | 932 | /5Phos/ACGGGCAACGACAACCTTCATACANNKTACTTAAAGAACCTGTTCTCTGAA |
| P722 | | |
| ERCAS12A- | 933 | /5Phos/GGCAACGACAACCTTCATACAATGNNKTTAAAGAACCTGTTCTCTGAAGAA |
| P723 | | |
| ERCAS12A- | 934 | /5Phos/AACGACAACCTTCATACAATGTACNNKAAGAACCTGTTCTCTGAAGAAAAC |
| P724 | | |
| ERCAS12A- | 935 | /5Phos/GACAACCTTCATACAATGTACTTANNKAACCTGTTCTCTGAAGAAAACTTG |
| P725 | | |
| ERCAS12A- | 936 | /5Phos/AACCTTCATACAATGTACTTAAAGNNKCTGTTCTCTGAAGAAAACTTGAAA |
| P726 | | |
| ERCAS12A- | 937 | /5Phos/CTTCATACAATGTACTTAAAGAACNNKTTCTCTGAAGAAAACTTGAAAGAT |
| P727 | | |
| ERCAS12A- | 938 | /5Phos/CATACAATGTACTTAAAGAACCTGNNKTCTGAAGAAAACTTGAAAGATATC |
| P728 | | |
| ERCAS12A- | 939 | /5Phos/ACAATGTACTTAAAGAACCTGTTCNNKGAAGAAAACTTGAAAGATATCGTG |
| P729 | | |
| ERCAS12A- | 940 | /5Phos/ATGTACTTAAAGAACCTGTTCTCTNNKGAAAACTTGAAAGATATCGTGCTT |
| P730 | | |
| ERCAS12A- | 941 | /5Phos/TACTTAAAGAACCTGTTCTCTGAANNKAACTTGAAAGATATCGTGCTTAAA |
| P731 | | |
| ERCAS12A- | 942 | /5Phos/TTAAAGAACCTGTTCTCTGAAGAANNKTTGAAAGATATCGTGCTTAAATTG |
| P732 | | |
| ERCAS12A- | 943 | /5Phos/AAGAACCTGTTCTCTGAAGAAAACNNKAAAGATATCGTGCTTAAATTGAAT |
| P733 | | |
| ERCAS12A- | 944 | /5Phos/AACCTGTTCTCTGAAGAAAACTTGNNKGATATCGTGCTTAAATTGAATGGC |
| P734 | | |
| ERCAS12A- | 945 | /5Phos/CTGTTCTCTGAAGAAAACTTGAAANNKATCGTGCTTAAATTGAATGGCGAG |
| P735 | | |
| ERCAS12A- | 946 | /5Phos/TTCTCTGAAGAAAACTTGAAAGATNNKGTGCTTAAATTGAATGGCGAGGCC |
| P736 | | |
| ERCAS12A- | 947 | /5Phos/TCTGAAGAAAACTTGAAAGATATCNNKCTTAAATTGAATGGCGAGGCCGAG |
| P737 | | |
| ERCAS12A- | 948 | /5Phos/GAAGAAAACTTGAAAGATATCGTGNNKAAATTGAATGGCGAGGCCGAGATT |
| P738 | | |
| ERCAS12A- | 949 | /5Phos/GAAAACTTGAAAGATATCGTGCTTNNKTTGAATGGCGAGGCCGAGATTTTT |
| P739 | | |
| ERCAS12A- | 950 | /5Phos/AACTTGAAAGATATCGTGCTTAAANNKAATGGCGAGGCCGAGATTTTTTTC |
| P740 | | |
| ERCAS12A- | 951 | /5Phos/TTGAAAGATATCGTGCTTAAATTGNNKGGCGAGGCCGAGATTTTTTTCCGT |
| P741 | | |
| ERCAS12A- | 952 | /5Phos/AAAGATATCGTGCTTAAATTGAATNNKGAGGCCGAGATTTTTTTCCGTAAA |
| P742 | | |
| ERCAS12A- | 953 | /5Phos/GATATCGTGCTTAAATTGAATGGCNNKGCCGAGATTTTTTTCCGTAAAAGC |
| P743 | | |
| ERCAS12A- | 954 | /5Phos/ATCGTGCTTAAATTGAATGGCGAGNNKGAGATTTTTTTCCGTAAAAGCTCG |
| P744 | | |
| ERCAS12A | 955 | /5Phos/GTGCTTAAATTGAATGGCGAGGCCNNKATTTTTTTCCGTAAAAGCTCGATT |
| P745 | | |
| ERCAS12A | 956 | /5Phos/CTTAAATTGAATGGCGAGGCCGAGNNKTTTTTCCGTAAAAGCTCGATTAAG |
| P746 | | |
| ERCAS12A- | 957 | /5Phos/AAATTGAATGGCGAGGCCGAGATTNNKTTCCGTAAAAGCTCGATTAAGAAT |
| P747 | | |
| ERCAS12A- | 958 | /5Phos/TTGAATGGCGAGGCCGAGATTTTTNNKCGTAAAAGCTCGATTAAGAATCCC |
| P748 | | |
| ERCAS12A- | 959 | /5Phos/AATGGCGAGGCCGAGATTTTTTTCNNKAAAAGCTCGATTAAGAATCCCATC |
| P749 | | |
| ERCAS12A- | 960 | /5Phos/GGCGAGGCCGAGATTTTTTTCCGTNNKAGCTCGATTAAGAATCCCATCATC |
| P750 | | |
| ERCAS12A- | 961 | /5Phos/GAGGCCGAGATTTTTTTCCGTAAANNKTCGATTAAGAATCCCATCATCCAC |
| P751 | | |
| ERCAS12A- | 962 | /5Phos/GCCGAGATTTTTTTCCGTAAAAGCNNKATTAAGAATCCCATCATCCACAAG |
| P752 | | |
| ERCAS12A- | 963 | /5Phos/GAGATTTTTTTCCGTAAAAGCTCGNNKAAGAATCCCATCATCCACAAGAAA |
| P753 | | |
| ERCAS12A- | 964 | /5Phos/ATTTTTTTCCGTAAAAGCTCGATTNNKAATCCCATCATCCACAAGAAAGGC |
| P754 | | |
| ERCAS12A- | 965 | /5Phos/TTTTTCCGTAAAAGCTCGATTAAGNNKCCCATCATCCACAAGAAAGGCAGC |
| P755 | | |
| ERCAS12A- | 966 | /5Phos/TTCCGTAAAAGCTCGATTAAGAATNNKATCATCCACAAGAAAGGCAGCATT |
| P756 | | |
| ERCAS12A- | 967 | /5Phos/CGTAAAAGCTCGATTAAGAATCCCNNKATCCACAAGAAAGGCAGCATTCTG |
| P757 | | |
| ERCAS12A- | 968 | /5Phos/AAAAGCTCGATTAAGAATCCCATCNNKCACAAGAAAGGCAGCATTCTGGTA |
| P758 | | |
| ERCAS12A- | 969 | /5Phos/AGCTCGATTAAGAATCCCATCATCNNKAAGAAAGGCAGCATTCTGGTAAAT |
| P759 | | |
| ERCAS12A- | 970 | /5Phos/TCGATTAAGAATCCCATCATCCACNNKAAAGGCAGCATTCTGGTAAATCGT |
| P760 | | |
| ERCAS12A- | 971 | /5Phos/ATTAAGAATCCCATCATCCACAAGNNKGGCAGCATTCTGGTAAATCGTACC |
| P761 | | |
| ERCAS12A- | 972 | /5Phos/AAGAATCCCATCATCCACAAGAAANNKAGCATTCTGGTAAATCGTACCTAT |
| P762 | | |
| ERCAS12A- | 973 | /5Phos/AATCCCATCATCCACAAGAAAGGCNNKATTCTGGTAAATCGTACCTATGAA |
| P763 | | |
| ERCAS12A- | 974 | /5Phos/CCCATCATCCACAAGAAAGGCAGCNNKCTGGTAAATCGTACCTATGAAGCG |
| P764 | | |
| ERCAS12A- | 975 | /5Phos/ATCATCCACAAGAAAGGCAGCATTNNKGTAAATCGTACCTATGAAGCGGAG |
| P765 | | |
| ERCAS12A- | 976 | /5Phos/ATCCACAAGAAAGGCAGCATTCTGNNKAATCGTACCTATGAAGCGGAGGAA |
| P766 | | |
| ERCAS12A- | 977 | /5Phos/CACAAGAAAGGCAGCATTCTGGTANNKCGTACCTATGAAGCGGAGGAAAAG |
| P767 | | |
| ERCAS12A- | 978 | /5Phos/AAGAAAGGCAGCATTCTGGTAAATNNKACCTATGAAGCGGAGGAAAAGGAC |
| P768 | | |
| ERCAS12A- | 979 | /5Phos/AAAGGCAGCATTCTGGTAAATCGTNNKTATGAAGCGGAGGAAAAGGACCAA |
| P769 | | |
| ERCAS12A- | 980 | /5Phos/GGCAGCATTCTGGTAAATCGTACCNNKGAAGCGGAGGAAAAGGACCAATTT |
| P770 | | |
| ERCAS12A- | 981 | /5Phos/AGCATTCTGGTAAATCGTACCTATNNKGCGGAGGAAAAGGACCAATTTGGT |
| P771 | | |
| ERCAS12A- | 982 | /5Phos/ATTCTGGTAAATCGTACCTATGAANNKGAGGAAAAGGACCAATTTGGTAAT |
| P772 | | |
| ERCAS12A- | 983 | /5Phos/CTGGTAAATCGTACCTATGAAGCGNNKGAAAAGGACCAATTTGGTAATATT |
| P773 | | |
| ERCAS12A- | 984 | /5Phos/GTAAATCGTACCTATGAAGCGGAGNNKAAGGACCAATTTGGTAATATTCAG |
| P774 | | |
| ERCAS12A- | 985 | /5Phos/AATCGTACCTATGAAGCGGAGGAANNKGACCAATTTGGTAATATTCAGATT |
| P775 | | |
| ERCAS12A- | 986 | /5Phos/CGTACCTATGAAGCGGAGGAAAAGNNKCAATTTGGTAATATTCAGATTGTC |
| P776 | | |
| ERCAS12A- | 987 | /5Phos/ACCTATGAAGCGGAGGAAAAGGACNNKTTTGGTAATATTCAGATTGTCCGT |
| P777 | | |
| ERCAS12A- | 988 | /5Phos/TATGAAGCGGAGGAAAAGGACCAANNKGGTAATATTCAGATTGTCCGTAAG |
| P778 | | |
| ERCAS12A- | 989 | /5Phos/GAAGCGGAGGAAAAGGACCAATTTNNKAATATTCAGATTGTCCGTAAGAAC |
| P779 | | |
| ERCAS12A- | 990 | /5Phos/GCGGAGGAAAAGGACCAATTTGGTNNKATTCAGATTGTCCGTAAGAACATC |
| P780 | | |
| ERCAS12A- | 991 | /5Phos/GAGGAAAAGGACCAATTTGGTAATNNKCAGATTGTCCGTAAGAACATCCCT |
| P781 | | |
| ERCAS12A- | 992 | /5Phos/GAAAAGGACCAATTTGGTAATATTNNKATTGTCCGTAAGAACATCCCTGAA |
| P782 | | |
| ERCAS12A- | 993 | /5Phos/AAGGACCAATTTGGTAATATTCAGNNKGTCCGTAAGAACATCCCTGAAAAT |
| P783 | | |
| ERCAS12A- | 994 | /5Phos/GACCAATTTGGTAATATTCAGATTNNKCGTAAGAACATCCCTGAAAATATC |
| P784 | | |
| ERCAS12A- | 995 | /5Phos/CAATTTGGTAATATTCAGATTGTCNNKAAGAACATCCCTGAAAATATCTAT |
| P785 | | |
| ERCAS12A- | 996 | /5Phos/TTTGGTAATATTCAGATTGTCCGTNNKAACATCCCTGAAAATATCTATCAA |
| P786 | | |
| ERCAS12A- | 997 | /5Phos/GGTAATATTCAGATTGTCCGTAAGNNKATCCCTGAAAATATCTATCAAGAA |
| P787 | | |
| ERCAS12A- | 998 | /5Phos/AATATTCAGATTGTCCGTAAGAACNNKCCTGAAAATATCTATCAAGAATTA |
| P788 | | |
| ERCAS12A- | 999 | /5Phos/ATTCAGATTGTCCGTAAGAACATCNNKGAAAATATCTATCAAGAATTATAT |
| P789 | | |
| ERCAS12A | 1000 | /5Phos/CAGATTGTCCGTAAGAACATCCCTNNKAATATCTATCAAGAATTATATAAA |
| P790 | | |
| ERCAS12A | 1001 | /5Phos/ATTGTCCGTAAGAACATCCCTGAANNKATCTATCAAGAATTATATAAATAT |
| P791 | | |
| ERCAS12A- | 1002 | /5Phos/GTCCGTAAGAACATCCCTGAAAATNNKTATCAAGAATTATATAAATATTTC |
| P792 | | |
| ERCAS12A- | 1003 | /5Phos/CGTAAGAACATCCCTGAAAATATCNNKCAAGAATTATATAAATATTTCAAC |
| P793 | | |
| ERCAS12A- | 1004 | /5Phos/AAGAACATCCCTGAAAATATCTATNNKGAATTATATAAATATTTCAACGAT |
| P794 | | |
| ERCAS12A- | 1005 | /5Phos/AACATCCCTGAAAATATCTATCAANNKTTATATAAATATTTCAACGATAAG |
| P795 | | |
| ERCAS12A- | 1006 | /5Phos/ATCCCTGAAAATATCTATCAAGAANNKTATAAATATTTCAACGATAAGTCG |
| P796 | | |
| ERCAS12A- | 1007 | /5Phos/CCTGAAAATATCTATCAAGAATTANNKAAATATTTCAACGATAAGTCGGAC |
| P797 | | |
| ERCAS12A- | 1008 | /5Phos/GAAAATATCTATCAAGAATTATATNNKTATTTCAACGATAAGTCGGACAAG |
| P798 | | |
| ERCAS12A- | 1009 | /5Phos/AATATCTATCAAGAATTATATAAANNKTTCAACGATAAGTCGGACAAGGAA |
| P799 | | |
| ERCAS12A- | 1010 | /5Phos/ATCTATCAAGAATTATATAAATATNNKAACGATAAGTCGGACAAGGAACTT |
| P800 | | |
| ERCAS12A- | 1011 | /5Phos/TATCAAGAATTATATAAATATTTCNNKGATAAGTCGGACAAGGAACTTAGC |
| P801 | | |
| ERCAS12A- | 1012 | /5Phos/CAAGAATTATATAAATATTTCAACNNKAAGTCGGACAAGGAACTTAGCGAT |
| P802 | | |
| ERCAS12A- | 1013 | /5Phos/GAATTATATAAATATTTCAACGATNNKTCGGACAAGGAACTTAGCGATGAA |
| P803 | | |
| ERCAS12A- | 1014 | /5Phos/TTATATAAATATTTCAACGATAAGNNKGACAAGGAACTTAGCGATGAAGCC |
| P804 | | |
| ERCAS12A- | 1015 | /5Phos/TATAAATATTTCAACGATAAGTCGNNKAAGGAACTTAGCGATGAAGCCGCG |
| P805 | | |
| ERCAS12A- | 1016 | /5Phos/AAATATTTCAACGATAAGTCGGACNNKGAACTTAGCGATGAAGCCGCGAAG |
| P806 | | |
| ERCAS12A- | 1017 | /5Phos/TATTTCAACGATAAGTCGGACAAGNNKCTTAGCGATGAAGCCGCGAAGTTG |
| P807 | | |
| ERCAS12A- | 1018 | /5Phos/TTCAACGATAAGTCGGACAAGGAANNKAGCGATGAAGCCGCGAAGTTGAAA |
| P808 | | |
| ERCAS12A- | 1019 | /5Phos/AACGATAAGTCGGACAAGGAACTTNNKGATGAAGCCGCGAAGTTGAAAAAT |
| P809 | | |
| ERCAS12A | 1020 | /5Phos/GATAAGTCGGACAAGGAACTTAGCNNKGAAGCCGCGAAGTTGAAAAATGTT |
| P810 | | |
| ERCAS12A- | 1021 | /5Phos/AAGTCGGACAAGGAACTTAGCGATNNKGCCGCGAAGTTGAAAAATGTTGTT |
| P811 | | |
| ERCAS12A- | 1022 | /5Phos/TCGGACAAGGAACTTAGCGATGAANNKGCGAAGTTGAAAAATGTTGTTGGT |
| P812 | | |
| ERCAS12A- | 1023 | /5Phos/GACAAGGAACTTAGCGATGAAGCCNNKAAGTTGAAAAATGTTGTTGGTCAC |
| P813 | | |
| ERCAS12A- | 1024 | /5Phos/AAGGAACTTAGCGATGAAGCCGCGNNKTTGAAAAATGTTGTTGGTCACCAC |
| P814 | | |
| ERCAS12A- | 1025 | /5Phos/GAACTTAGCGATGAAGCCGCGAAGNNKAAAAATGTTGTTGGTCACCACGAA |
| P815 | | |
| ERCAS12A- | 1026 | /5Phos/CTTAGCGATGAAGCCGCGAAGTTGNNKAATGTTGTTGGTCACCACGAAGCA |
| P816 | | |
| ERCAS12A- | 1027 | /5Phos/AGCGATGAAGCCGCGAAGTTGAAANNKGTTGTTGGTCACCACGAAGCAGCA |
| P817 | | |
| ERCAS12A- | 1028 | /5Phos/GATGAAGCCGCGAAGTTGAAAAATNNKGTTGGTCACCACGAAGCAGCAACA |
| P818 | | |
| ERCAS12A- | 1029 | /5Phos/GAAGCCGCGAAGTTGAAAAATGTTNNKGGTCACCACGAAGCAGCAACAAAC |
| P819 | | |
| ERCAS12A- | 1030 | /5Phos/GCCGCGAAGTTGAAAAATGTTGTTNNKCACCACGAAGCAGCAACAAACATT |
| P820 | | |
| ERCAS12A- | 1031 | /5Phos/GCGAAGTTGAAAAATGTTGTTGGTNNKCACGAAGCAGCAACAAACATTGTG |
| P821 | | |
| ERCAS12A- | 1032 | /5Phos/AAGTTGAAAAATGTTGTTGGTCACNNKGAAGCAGCAACAAACATTGTGAAA |
| P822 | | |
| ERCAS12A- | 1033 | /5Phos/TTGAAAAATGTTGTTGGTCACCACNNKGCAGCAACAAACATTGTGAAAGAC |
| P823 | | |
| ERCAS12A- | 1034 | /5Phos/AAAAATGTTGTTGGTCACCACGAANNKGCAACAAACATTGTGAAAGACTAT |
| P824 | | |
| ERCAS12A- | 1035 | /5Phos/AATGTTGTTGGTCACCACGAAGCANNKACAAACATTGTGAAAGACTATCGC |
| P825 | | |
| ERCAS12A- | 1036 | /5Phos/GTTGTTGGTCACCACGAAGCAGCANNKAACATTGTGAAAGACTATCGCTAC |
| P826 | | |
| ERCAS12A- | 1037 | /5Phos/GTTGGTCACCACGAAGCAGCAACANNKATTGTGAAAGACTATCGCTACACT |
| P827 | | |
| ERCAS12A- | 1038 | /5Phos/GGTCACCACGAAGCAGCAACAAACNNKGTGAAAGACTATCGCTACACTTAC |
| P828 | | |
| ERCAS12A- | 1039 | /5Phos/CACCACGAAGCAGCAACAAACATTNNKAAAGACTATCGCTACACTTACGAT |
| P829 | | |
| ERCAS12A- | 1040 | /5Phos/CACGAAGCAGCAACAAACATTGTGNNKGACTATCGCTACACTTACGATAAG |
| P830 | | |
| ERCAS12A- | 1041 | /5Phos/GAAGCAGCAACAAACATTGTGAAANNKTATCGCTACACTTACGATAAGTAC |
| P831 | | |
| ERCAS12A- | 1042 | /5Phos/GCAGCAACAAACATTGTGAAAGACNNKCGCTACACTTACGATAAGTACTTT |
| P832 | | |
| ERCAS12A- | 1043 | /5Phos/GCAACAAACATTGTGAAAGACTATNNKTACACTTACGATAAGTACTTTTTA |
| P833 | | |
| ERCAS12A- | 1044 | /5Phos/ACAAACATTGTGAAAGACTATCGCNNKACTTACGATAAGTACTTTTTACAT |
| P834 | | |
| ERCAS12A- | 1045 | /5Phos/AACATTGTGAAAGACTATCGCTACNNKTACGATAAGTACTTTTTACATATG |
| P835 | | |
| ERCAS12A- | 1046 | /5Phos/ATTGTGAAAGACTATCGCTACACTNNKGATAAGTACTTTTTACATATGCCT |
| P836 | | |
| ERCAS12A- | 1047 | /5Phos/GTGAAAGACTATCGCTACACTTACNNKAAGTACTTTTTACATATGCCTATT |
| P837 | | |
| ERCAS12A- | 1048 | /5Phos/AAAGACTATCGCTACACTTACGATNNKTACTTTTTACATATGCCTATTACG |
| P838 | | |
| ERCAS12A- | 1049 | /5Phos/GACTATCGCTACACTTACGATAAGNNKTTTTTACATATGCCTATTACGATT |
| P839 | | |
| ERCAS12A- | 1050 | /5Phos/TATCGCTACACTTACGATAAGTACNNKTTACATATGCCTATTACGATTAAC |
| P840 | | |
| ERCAS12A- | 1051 | /5Phos/CGCTACACTTACGATAAGTACTTTNNKCATATGCCTATTACGATTAACTTT |
| P841 | | |
| ERCAS12A- | 1052 | /5Phos/TACACTTACGATAAGTACTTTTTANNKATGCCTATTACGATTAACTTTAAG |
| P842 | | |
| ERCAS12A- | 1053 | /5Phos/ACTTACGATAAGTACTTTTTACATNNKCCTATTACGATTAACTTTAAGGCA |
| P843 | | |
| ERCAS12A- | 1054 | /5Phos/TACGATAAGTACTTTTTACATATGNNKATTACGATTAACTTTAAGGCAAAT |
| P844 | | |
| ERCAS12A- | 1055 | /5Phos/GATAAGTACTTTTTACATATGCCTNNKACGATTAACTTTAAGGCAAATAAG |
| P845 | | |
| ERCAS12A- | 1056 | /5Phos/AAGTACTTTTTACATATGCCTATTNNKATTAACTTTAAGGCAAATAAGACA |
| P846 | | |
| ERCAS12A- | 1057 | /5Phos/TACTTTTTACATATGCCTATTACGNNKAACTTTAAGGCAAATAAGACAGGT |
| P847 | | |
| ERCAS12A- | 1058 | /5Phos/TTTTTACATATGCCTATTACGATTNNKTTTAAGGCAAATAAGACAGGTTTT |
| P848 | | |
| ERCAS12A- | 1059 | /5Phos/TTACATATGCCTATTACGATTAACNNKAAGGCAAATAAGACAGGTTTTATC |
| P849 | | |
| ERCAS12A- | 1060 | /5Phos/CATATGCCTATTACGATTAACTTTNNKGCAAATAAGACAGGTTTTATCAAC |
| P850 | | |
| ERCAS12A- | 1061 | /5Phos/ATGCCTATTACGATTAACTTTAAGNNKAATAAGACAGGTTTTATCAACGAC |
| P851 | | |
| ERCAS12A- | 1062 | /5Phos/CCTATTACGATTAACTTTAAGGCANNKAAGACAGGTTTTATCAACGACCGT |
| P852 | | |
| ERCAS12A- | 1063 | /5Phos/ATTACGATTAACTTTAAGGCAAATNNKACAGGTTTTATCAACGACCGTATC |
| P853 | | |
| ERCAS12A- | 1064 | /5Phos/ACGATTAACTTTAAGGCAAATAAGNNKGGTTTTATCAACGACCGTATCCTG |
| P854 | | |
| ERCAS12A- | 1065 | /5Phos/ATTAACTTTAAGGCAAATAAGACANNKTTTATCAACGACCGTATCCTGCAA |
| P855 | | |
| ERCAS12A- | 1066 | /5Phos/AACTTTAAGGCAAATAAGACAGGTNNKATCAACGACCGTATCCTGCAATAT |
| P856 | | |
| ERCAS12A- | 1067 | /5Phos/TTTAAGGCAAATAAGACAGGTTTTNNKAACGACCGTATCCTGCAATATATT |
| P857 | | |
| ERCAS12A- | 1068 | /5Phos/AAGGCAAATAAGACAGGTTTTATCNNKGACCGTATCCTGCAATATATTGCA |
| P858 | | |
| ERCAS12A- | 1069 | /5Phos/GCAAATAAGACAGGTTTTATCAACNNKCGTATCCTGCAATATATTGCAAAA |
| P859 | | |
| ERCAS12A- | 1070 | /5Phos/AATAAGACAGGTTTTATCAACGACNNKATCCTGCAATATATTGCAAAAGAG |
| P860 | | |
| ERCAS12A- | 1071 | /5Phos/AAGACAGGTTTTATCAACGACCGTNNKCTGCAATATATTGCAAAAGAGAAG |
| P861 | | |
| ERCAS12A- | 1072 | /5Phos/ACAGGTTTTATCAACGACCGTATCNNKCAATATATTGCAAAAGAGAAGGAC |
| P862 | | |
| ERCAS12A- | 1073 | /5Phos/GGTTTTATCAACGACCGTATCCTGNNKTATATTGCAAAAGAGAAGGACCTG |
| P863 | | |
| ERCAS12A- | 1074 | /5Phos/TTTATCAACGACCGTATCCTGCAANNKATTGCAAAAGAGAAGGACCTGCAT |
| P864 | | |
| ERCAS12A- | 1075 | /5Phos/ATCAACGACCGTATCCTGCAATATNNKGCAAAAGAGAAGGACCTGCATGTC |
| P865 | | |
| ERCAS12A- | 1076 | /5Phos/AACGACCGTATCCTGCAATATATTNNKAAAGAGAAGGACCTGCATGTCATT |
| P866 | | |
| ERCAS12A- | 1077 | /5Phos/GACCGTATCCTGCAATATATTGCANNKGAGAAGGACCTGCATGTCATTGGG |
| P867 | | |
| ERCAS12A- | 1078 | /5Phos/CGTATCCTGCAATATATTGCAAAANNKAAGGACCTGCATGTCATTGGGATT |
| P868 | | |
| ERCAS12A- | 1079 | /5Phos/ATCCTGCAATATATTGCAAAAGAGNNKGACCTGCATGTCATTGGGATTGAT |
| P869 | | |
| ERCAS12A- | 1080 | /5Phos/CTGCAATATATTGCAAAAGAGAAGNNKCTGCATGTCATTGGGATTGATCGC |
| P870 | | |
| ERCAS12A- | 1081 | /5Phos/CAATATATTGCAAAAGAGAAGGACNNKCATGTCATTGGGATTGATCGCGGT |
| P871 | | |
| ERCAS12A- | 1082 | /5Phos/TATATTGCAAAAGAGAAGGACCTGNNKGTCATTGGGATTGATCGCGGTGAA |
| P872 | | |
| ERCAS12A- | 1083 | /5Phos/ATTGCAAAAGAGAAGGACCTGCATNNKATTGGGATTGATCGCGGTGAACGC |
| P873 | | |
| ERCAS12A- | 1084 | /5Phos/GCAAAAGAGAAGGACCTGCATGTCNNKGGGATTGATCGCGGTGAACGCAAT |
| P874 | | |
| ERCAS12A- | 1085 | /5Phos/AAAGAGAAGGACCTGCATGTCATTNNKATTGATCGCGGTGAACGCAATCTG |
| P875 | | |
| ERCAS12A- | 1086 | /5Phos/GAGAAGGACCTGCATGTCATTGGGNNKGATCGCGGTGAACGCAATCTGATT |
| P876 | | |
| ERCAS12A- | 1087 | /5Phos/AAGGACCTGCATGTCATTGGGATTNNKCGCGGTGAACGCAATCTGATTTAC |
| P877 | | |
| ERCAS12A- | 1088 | /5Phos/GACCTGCATGTCATTGGGATTGATNNKGGTGAACGCAATCTGATTTACGTG |
| P878 | | |
| ERCAS12A- | 1089 | /5Phos/CTGCATGTCATTGGGATTGATCGCNNKGAACGCAATCTGATTTACGTGAGT |
| P879 | | |
| ERCAS12A- | 1090 | /5Phos/CATGTCATTGGGATTGATCGCGGTNNKCGCAATCTGATTTACGTGAGTGTT |
| P880 | | |
| ERCAS12A- | 1091 | /5Phos/GTCATTGGGATTGATCGCGGTGAANNKAATCTGATTTACGTGAGTGTTATT |
| P881 | | |
| ERCAS12A- | 1092 | /5Phos/ATTGGGATTGATCGCGGTGAACGCNNKCTGATTTACGTGAGTGTTATTGAT |
| P882 | | |
| ERCAS12A- | 1093 | /5Phos/GGGATTGATCGCGGTGAACGCAATNNKATTTACGTGAGTGTTATTGATACC |
| P883 | | |
| ERCAS12A- | 1094 | /5Phos/ATTGATCGCGGTGAACGCAATCTGNNKTACGTGAGTGTTATTGATACCTGC |
| P884 | | |
| ERCAS12A- | 1095 | /5Phos/GATCGCGGTGAACGCAATCTGATTNNKGTGAGTGTTATTGATACCTGCGGT |
| P885 | | |
| ERCAS12A- | 1096 | /5Phos/CGCGGTGAACGCAATCTGATTTACNNKAGTGTTATTGATACCTGCGGTAAT |
| P886 | | |
| ERCAS12A- | 1097 | /5Phos/GGTGAACGCAATCTGATTTACGTGNNKGTTATTGATACCTGCGGTAATATT |
| P887 | | |
| ERCAS12A- | 1098 | /5Phos/GAACGCAATCTGATTTACGTGAGTNNKATTGATACCTGCGGTAATATTGTT |
| P888 | | |
| ERCAS12A- | 1099 | /5Phos/CGCAATCTGATTTACGTGAGTGTTNNKGATACCTGCGGTAATATTGTTGAG |
| P889 | | |
| ERCAS12A- | 1100 | /5Phos/AATCTGATTTACGTGAGTGTTATTNNKACCTGCGGTAATATTGTTGAGCAA |
| P890 | | |
| ERCAS12A- | 1101 | /5Phos/CTGATTTACGTGAGTGTTATTGATNNKTGCGGTAATATTGTTGAGCAAAAG |
| P891 | | |
| ERCAS12A- | 1102 | /5Phos/ATTTACGTGAGTGTTATTGATACCNNKGGTAATATTGTTGAGCAAAAGTCT |
| P892 | | |
| ERCAS12A- | 1103 | /5Phos/TACGTGAGTGTTATTGATACCTGCNNKAATATTGTTGAGCAAAAGTCTTTT |
| P893 | | |
| ERCAS12A- | 1104 | /5Phos/GTGAGTGTTATTGATACCTGCGGTNNKATTGTTGAGCAAAAGTCTTTTAAT |
| P894 | | |
| ERCAS12A- | 1105 | /5Phos/AGTGTTATTGATACCTGCGGTAATNNKGTTGAGCAAAAGTCTTTTAATATC |
| P895 | | |
| ERCAS12A- | 1106 | /5Phos/GTTATTGATACCTGCGGTAATATTNNKGAGCAAAAGTCTTTTAATATCGTT |
| P896 | | |
| ERCAS12A- | 1107 | /5Phos/ATTGATACCTGCGGTAATATTGTTNNKCAAAAGTCTTTTAATATCGTTAAT |
| P897 | | |
| ERCAS12A- | 1108 | /5Phos/GATACCTGCGGTAATATTGTTGAGNNKAAGTCTTTTAATATCGTTAATGGT |
| P898 | | |
| ERCAS12A- | 1109 | /5Phos/ACCTGCGGTAATATTGTTGAGCAANNKTCTTTTAATATCGTTAATGGTTAC |
| P899 | | |
| ERCAS12A- | 1110 | /5Phos/TGCGGTAATATTGTTGAGCAAAAGNNKTTTAATATCGTTAATGGTTACGAC |
| P900 | | |
| ERCAS12A- | 1111 | /5Phos/GGTAATATTGTTGAGCAAAAGTCTNNKAATATCGTTAATGGTTACGACTAC |
| P901 | | |
| ERCAS12A- | 1112 | /5Phos/AATATTGTTGAGCAAAAGTCTTTTNNKATCGTTAATGGTTACGACTACCAA |
| P902 | | |
| ERCAS12A- | 1113 | /5Phos/ATTGTTGAGCAAAAGTCTTTTAATNNKGTTAATGGTTACGACTACCAAATT |
| P903 | | |
| ERCAS12A- | 1114 | /5Phos/GTTGAGCAAAAGTCTTTTAATATCNNKAATGGTTACGACTACCAAATTAAG |
| P904 | | |
| ERCAS12A- | 1115 | /5Phos/GAGCAAAAGTCTTTTAATATCGTTNNKGGTTACGACTACCAAATTAAGCTT |
| P905 | | |
| ERCAS12A- | 1116 | /5Phos/CAAAAGTCTTTTAATATCGTTAATNNKTACGACTACCAAATTAAGCTTAAA |
| P906 | | |
| ERCAS12A- | 1117 | /5Phos/AAGTCTTTTAATATCGTTAATGGTNNKGACTACCAAATTAAGCTTAAACAA |
| P907 | | |
| ERCAS12A- | 1118 | /5Phos/TCTTTTAATATCGTTAATGGTTACNNKTACCAAATTAAGCTTAAACAACAG |
| P908 | | |
| ERCAS12A- | 1119 | /5Phos/TTTAATATCGTTAATGGTTACGACNNKCAAATTAAGCTTAAACAACAGGAA |
| P909 | | |
| ERCAS12A- | 1120 | /5Phos/AATATCGTTAATGGTTACGACTACNNKATTAAGCTTAAACAACAGGAAGGT |
| P910 | | |
| ERCAS12A- | 1121 | /5Phos/ATCGTTAATGGTTACGACTACCAANNKAAGCTTAAACAACAGGAAGGTGCC |
| P911 | | |
| ERCAS12A- | 1122 | /5Phos/GTTAATGGTTACGACTACCAAATTNNKCTTAAACAACAGGAAGGTGCCCGC |
| P912 | | |
| ERCAS12A- | 1123 | /5Phos/AATGGTTACGACTACCAAATTAAGNNKAAACAACAGGAAGGTGCCCGCCAG |
| P913 | | |
| ERCAS12A- | 1124 | /5Phos/GGTTACGACTACCAAATTAAGCTTNNKCAACAGGAAGGTGCCCGCCAGATC |
| P914 | | |
| ERCAS12A- | 1125 | /5Phos/TACGACTACCAAATTAAGCTTAAANNKCAGGAAGGTGCCCGCCAGATCGCC |
| P915 | | |
| ERCAS12A- | 1126 | /5Phos/GACTACCAAATTAAGCTTAAACAANNKGAAGGTGCCCGCCAGATCGCCCGT |
| P916 | | |
| ERCAS12A- | 1127 | /5Phos/TACCAAATTAAGCTTAAACAACAGNNKGGTGCCCGCCAGATCGCCCGTAAG |
| P917 | | |
| ERCAS12A | 1128 | /5Phos/CAAATTAAGCTTAAACAACAGGAANNKGCCCGCCAGATCGCCCGTAAGGAG |
| P918 | | |
| ERCAS12A- | 1129 | /5Phos/ATTAAGCTTAAACAACAGGAAGGTNNKCGCCAGATCGCCCGTAAGGAGTGG |
| P919 | | |
| ERCAS12A- | 1130 | /5Phos/AAGCTTAAACAACAGGAAGGTGCCNNKCAGATCGCCCGTAAGGAGTGGAAG |
| P920 | | |
| ERCAS12A- | 1131 | /5Phos/CTTAAACAACAGGAAGGTGCCCGCNNKATCGCCCGTAAGGAGTGGAAGGAA |
| P921 | | |
| ERCAS12A- | 1132 | /5Phos/AAACAACAGGAAGGTGCCCGCCAGNNKGCCCGTAAGGAGTGGAAGGAAATC |
| P922 | | |
| ERCAS12A- | 1133 | /5Phos/CAACAGGAAGGTGCCCGCCAGATCNNKCGTAAGGAGTGGAAGGAAATCGGA |
| P923 | | |
| ERCAS12A- | 1134 | /5Phos/CAGGAAGGTGCCCGCCAGATCGCCNNKAAGGAGTGGAAGGAAATCGGAAAA |
| P924 | | |
| ERCAS12A- | 1135 | /5Phos/GAAGGTGCCCGCCAGATCGCCCGTNNKGAGTGGAAGGAAATCGGAAAAATT |
| P925 | | |
| ERCAS12A- | 1136 | /5Phos/GGTGCCCGCCAGATCGCCCGTAAGNNKTGGAAGGAAATCGGAAAAATTAAG |
| P926 | | |
| ERCAS12A- | 1137 | /5Phos/GCCCGCCAGATCGCCCGTAAGGAGNNKAAGGAAATCGGAAAAATTAAGGAA |
| P927 | | |
| ERCAS12A- | 1138 | /5Phos/CGCCAGATCGCCCGTAAGGAGTGGNNKGAAATCGGAAAAATTAAGGAAATC |
| P928 | | |
| ERCAS12A- | 1139 | /5Phos/CAGATCGCCCGTAAGGAGTGGAAGNNKATCGGAAAAATTAAGGAAATCAAA |
| P929 | | |
| ERCAS12A- | 1140 | /5Phos/ATCGCCCGTAAGGAGTGGAAGGAANNKGGAAAAATTAAGGAAATCAAAGAG |
| P930 | | |
| ERCAS12A- | 1141 | /5Phos/GCCCGTAAGGAGTGGAAGGAAATCNNKAAAATTAAGGAAATCAAAGAGGGA |
| P931 | | |
| ERCAS12A- | 1142 | /5Phos/CGTAAGGAGTGGAAGGAAATCGGANNKATTAAGGAAATCAAAGAGGGATAT |
| P932 | | |
| ERCAS12A- | 1143 | /5Phos/AAGGAGTGGAAGGAAATCGGAAAANNKAAGGAAATCAAAGAGGGATATCTG |
| P933 | | |
| ERCAS12A- | 1144 | /5Phos/GAGTGGAAGGAAATCGGAAAAATTNNKGAAATCAAAGAGGGATATCTGAGC |
| P934 | | |
| ERCAS12A- | 1145 | /5Phos/TGGAAGGAAATCGGAAAAATTAAGNNKATCAAAGAGGGATATCTGAGCTTG |
| P935 | | |
| ERCAS12A- | 1146 | /5Phos/AAGGAAATCGGAAAAATTAAGGAANNKAAAGAGGGATATCTGAGCTTGGTT |
| P936 | | |
| ERCAS12A- | 1147 | /5Phos/GAAATCGGAAAAATTAAGGAAATCNNKGAGGGATATCTGAGCTTGGTTATT |
| P937 | | |
| ERCAS12A- | 1148 | /5Phos/ATCGGAAAAATTAAGGAAATCAAANNKGGATATCTGAGCTTGGTTATTCAT |
| P938 | | |
| ERCAS12A- | 1149 | /5Phos/GGAAAAATTAAGGAAATCAAAGAGNNKTATCTGAGCTTGGTTATTCATGAA |
| P939 | | |
| ERCAS12A- | 1150 | /5Phos/AAAATTAAGGAAATCAAAGAGGGANNKCTGAGCTTGGTTATTCATGAAATC |
| P940 | | |
| ERCAS12A- | 1151 | /5Phos/ATTAAGGAAATCAAAGAGGGATATNNKAGCTTGGTTATTCATGAAATCTCA |
| P941 | | |
| ERCAS12A- | 1152 | /5Phos/AAGGAAATCAAAGAGGGATATCTGNNKTTGGTTATTCATGAAATCTCAAAG |
| P942 | | |
| ERCAS12A- | 1153 | /5Phos/GAAATCAAAGAGGGATATCTGAGCNNKGTTATTCATGAAATCTCAAAGATG |
| P943 | | |
| ERCAS12A- | 1154 | /5Phos/ATCAAAGAGGGATATCTGAGCTTGNNKATTCATGAAATCTCAAAGATGGTT |
| P944 | | |
| ERCAS12A- | 1155 | /5Phos/AAAGAGGGATATCTGAGCTTGGTTNNKCATGAAATCTCAAAGATGGTTATT |
| P945 | | |
| ERCAS12A- | 1156 | /5Phos/GAGGGATATCTGAGCTTGGTTATTNNKGAAATCTCAAAGATGGTTATTAAG |
| P946 | | |
| ERCAS12A- | 1157 | /5Phos/GGATATCTGAGCTTGGTTATTCATNNKATCTCAAAGATGGTTATTAAGTAC |
| P947 | | |
| ERCAS12A- | 1158 | /5Phos/TATCTGAGCTTGGTTATTCATGAANNKTCAAAGATGGTTATTAAGTACAAC |
| P948 | | |
| ERCAS12A- | 1159 | /5Phos/CTGAGCTTGGTTATTCATGAAATCNNKAAGATGGTTATTAAGTACAACGCC |
| P949 | | |
| ERCAS12A- | 1160 | /5Phos/AGCTTGGTTATTCATGAAATCTCANNKATGGTTATTAAGTACAACGCCATC |
| P950 | | |
| ERCAS12A- | 1161 | /5Phos/TTGGTTATTCATGAAATCTCAAAGNNKGTTATTAAGTACAACGCCATCATC |
| P951 | | |
| ERCAS12A- | 1162 | /5Phos/GTTATTCATGAAATCTCAAAGATGNNKATTAAGTACAACGCCATCATCGCT |
| P952 | | |
| ERCAS12A- | 1163 | /5Phos/ATTCATGAAATCTCAAAGATGGTTNNKAAGTACAACGCCATCATCGCTATG |
| P953 | | |
| ERCAS12A- | 1164 | /5Phos/CATGAAATCTCAAAGATGGTTATTNNKTACAACGCCATCATCGCTATGGAA |
| P954 | | |
| ERCAS12A- | 1165 | /5Phos/GAAATCTCAAAGATGGTTATTAAGNNKAACGCCATCATCGCTATGGAAGAC |
| P955 | | |
| ERCAS12A- | 1166 | /5Phos/ATCTCAAAGATGGTTATTAAGTACNNKGCCATCATCGCTATGGAAGACTTA |
| P956 | | |
| ERCAS12A- | 1167 | /5Phos/TCAAAGATGGTTATTAAGTACAACNNKATCATCGCTATGGAAGACTTATCG |
| P957 | | |
| ERCAS12A | 1168 | /5Phos/AAGATGGTTATTAAGTACAACGCCNNKATCGCTATGGAAGACTTATCGTAT |
| P958 | | |
| ERCAS12A- | 1169 | /5Phos/ATGGTTATTAAGTACAACGCCATCNNKGCTATGGAAGACTTATCGTATGGG |
| P959 | | |
| ERCAS12A- | 1170 | /5Phos/GTTATTAAGTACAACGCCATCATCNNKATGGAAGACTTATCGTATGGGTTT |
| P960 | | |
| ERCAS12A- | 1171 | /5Phos/ATTAAGTACAACGCCATCATCGCTNNKGAAGACTTATCGTATGGGTTTAAA |
| P961 | | |
| ERCAS12A | 1172 | /5Phos/AAGTACAACGCCATCATCGCTATGNNKGACTTATCGTATGGGTTTAAAAAG |
| P962 | | |
| ERCAS12A- | 1173 | /5Phos/TACAACGCCATCATCGCTATGGAANNKTTATCGTATGGGTTTAAAAAGGGT |
| P963 | | |
| ERCAS12A- | 1174 | /5Phos/AACGCCATCATCGCTATGGAAGACNNKTCGTATGGGTTTAAAAAGGGTCGT |
| P964 | | |
| ERCAS12A- | 1175 | /5Phos/GCCATCATCGCTATGGAAGACTTANNKTATGGGTTTAAAAAGGGTCGTTTC |
| P965 | | |
| ERCAS12A- | 1176 | /5Phos/ATCATCGCTATGGAAGACTTATCGNNKGGGTTTAAAAAGGGTCGTTTCAAA |
| P966 | | |
| ERCAS12A- | 1177 | /5Phos/ATCGCTATGGAAGACTTATCGTATNNKTTTAAAAAGGGTCGTTTCAAAGTT |
| P967 | | |
| ERCAS12A- | 1178 | /5Phos/GCTATGGAAGACTTATCGTATGGGNNKAAAAAGGGTCGTTTCAAAGTTGAG |
| P968 | | |
| ERCAS12A- | 1179 | /5Phos/ATGGAAGACTTATCGTATGGGTTTNNKAAGGGTCGTTTCAAAGTTGAGCGC |
| P969 | | |
| ERCAS12A- | 1180 | /5Phos/GAAGACTTATCGTATGGGTTTAAANNKGGTCGTTTCAAAGTTGAGCGCCAG |
| P970 | | |
| ERCAS12A- | 1181 | /5Phos/GACTTATCGTATGGGTTTAAAAAGNNKCGTTTCAAAGTTGAGCGCCAGGTC |
| P971 | | |
| ERCAS12A- | 1182 | /5Phos/TTATCGTATGGGTTTAAAAAGGGTNNKTTCAAAGTTGAGCGCCAGGTCTAC |
| P972 | | |
| ERCAS12A- | 1183 | /5Phos/TCGTATGGGTTTAAAAAGGGTCGTNNKAAAGTTGAGCGCCAGGTCTACCAA |
| P973 | | |
| ERCAS12A- | 1184 | /5Phos/TATGGGTTTAAAAAGGGTCGTTTCNNKGTTGAGCGCCAGGTCTACCAAAAG |
| P974 | | |
| ERCAS12A- | 1185 | /5Phos/GGGTTTAAAAAGGGTCGTTTCAAANNKGAGCGCCAGGTCTACCAAAAGTTT |
| P975 | | |
| ERCAS12A- | 1186 | /5Phos/TTTAAAAAGGGTCGTTTCAAAGTTNNKCGCCAGGTCTACCAAAAGTTTGAA |
| P976 | | |
| ERCAS12A- | 1187 | /5Phos/AAAAAGGGTCGTTTCAAAGTTGAGNNKCAGGTCTACCAAAAGTTTGAAACG |
| P977 | | |
| ERCAS12A- | 1188 | /5Phos/AAGGGTCGTTTCAAAGTTGAGCGCNNKGTCTACCAAAAGTTTGAAACGATG |
| P978 | | |
| ERCAS12A- | 1189 | /5Phos/GGTCGTTTCAAAGTTGAGCGCCAGNNKTACCAAAAGTTTGAAACGATGCTT |
| P979 | | |
| ERCAS12A- | 1190 | /5Phos/CGTTTCAAAGTTGAGCGCCAGGTCNNKCAAAAGTTTGAAACGATGCTTATT |
| P980 | | |
| ERCAS12A- | 1191 | /5Phos/TTCAAAGTTGAGCGCCAGGTCTACNNKAAGTTTGAAACGATGCTTATTAAT |
| P981 | | |
| ERCAS12A- | 1192 | /5Phos/AAAGTTGAGCGCCAGGTCTACCAANNKTTTGAAACGATGCTTATTAATAAA |
| P982 | | |
| ERCAS12A- | 1193 | /5Phos/GTTGAGCGCCAGGTCTACCAAAAGNNKGAAACGATGCTTATTAATAAATTA |
| P983 | | |
| ERCAS12A- | 1194 | /5Phos/GAGCGCCAGGTCTACCAAAAGTTTNNKACGATGCTTATTAATAAATTAAAC |
| P984 | | |
| ERCAS12A- | 1195 | /5Phos/CGCCAGGTCTACCAAAAGTTTGAANNKATGCTTATTAATAAATTAAACTAC |
| P985 | | |
| ERCAS12A- | 1196 | /5Phos/CAGGTCTACCAAAAGTTTGAAACGNNKCTTATTAATAAATTAAACTACTTG |
| P986 | | |
| ERCAS12A- | 1197 | /5Phos/GTCTACCAAAAGTTTGAAACGATGNNKATTAATAAATTAAACTACTTGGTT |
| P987 | | |
| ERCAS12A- | 1198 | /5Phos/TACCAAAAGTTTGAAACGATGCTTNNKAATAAATTAAACTACTTGGTTTTC |
| P988 | | |
| ERCAS12A- | 1199 | /5Phos/CAAAAGTTTGAAACGATGCTTATTNNKAAATTAAACTACTTGGTTTTCAAA |
| P989 | | |
| ERCAS12A- | 1200 | /5Phos/AAGTTTGAAACGATGCTTATTAATNNKTTAAACTACTTGGTTTTCAAAGAT |
| P990 | | |
| ERCAS12A- | 1201 | /5Phos/TTTGAAACGATGCTTATTAATAAANNKAACTACTTGGTTTTCAAAGATATC |
| P991 | | |
| ERCAS12A- | 1202 | /5Phos/GAAACGATGCTTATTAATAAATTANNKTACTTGGTTTTCAAAGATATCTCT |
| P992 | | |
| ERCAS12A- | 1203 | /5Phos/ACGATGCTTATTAATAAATTAAACNNKTTGGTTTTCAAAGATATCTCTATT |
| P993 | | |
| ERCAS12A- | 1204 | /5Phos/ATGCTTATTAATAAATTAAACTACNNKGTTTTCAAAGATATCTCTATTACC |
| P994 | | |
| ERCAS12A- | 1205 | /5Phos/CTTATTAATAAATTAAACTACTTGNNKTTCAAAGATATCTCTATTACCGAG |
| P995 | | |
| ERCAS12A- | 1206 | /5Phos/ATTAATAAATTAAACTACTTGGTTNNKAAAGATATCTCTATTACCGAGAAT |
| P996 | | |
| ERCAS12A- | 1207 | /5Phos/AATAAATTAAACTACTTGGTTTTCNNKGATATCTCTATTACCGAGAATGGA |
| P997 | | |
| ERCAS12A- | 1208 | /5Phos/AAATTAAACTACTTGGTTTTCAAANNKATCTCTATTACCGAGAATGGAGGT |
| P998 | | |
| ERCAS12A- | 1209 | /5Phos/TTAAACTACTTGGTTTTCAAAGATNNKTCTATTACCGAGAATGGAGGTTTA |
| P999 | | |
| ERCAS12A- | 1210 | /5Phos/AACTACTTGGTTTTCAAAGATATCNNKATTACCGAGAATGGAGGTTTACTG |
| P1000 | | |
| ERCAS12A- | 1211 | /5Phos/TACTTGGTTTTCAAAGATATCTCTNNKACCGAGAATGGAGGTTTACTGAAA |
| P1001 | | |
| ERCAS12A- | 1212 | /5Phos/TTGGTTTTCAAAGATATCTCTATTNNKGAGAATGGAGGTTTACTGAAAGGA |
| P1002 | | |
| ERCAS12A- | 1213 | /5Phos/GTTTTCAAAGATATCTCTATTACCNNKAATGGAGGTTTACTGAAAGGATAC |
| P1003 | | |
| ERCAS12A- | 1214 | /5Phos/TTCAAAGATATCTCTATTACCGAGNNKGGAGGTTTACTGAAAGGATACCAG |
| P1004 | | |
| ERCAS12A- | 1215 | /5Phos/AAAGATATCTCTATTACCGAGAATNNKGGTTTACTGAAAGGATACCAGTTA |
| P1005 | | |
| ERCAS12A- | 1216 | /5Phos/GATATCTCTATTACCGAGAATGGANNKTTACTGAAAGGATACCAGTTAACG |
| P1006 | | |
| ERCAS12A- | 1217 | /5Phos/ATCTCTATTACCGAGAATGGAGGTNNKCTGAAAGGATACCAGTTAACGTAT |
| P1007 | | |
| ERCAS12A- | 1218 | /5Phos/TCTATTACCGAGAATGGAGGTTTANNKAAAGGATACCAGTTAACGTATATC |
| P1008 | | |
| ERCAS12A- | 1219 | /5Phos/ATTACCGAGAATGGAGGTTTACTGNNKGGATACCAGTTAACGTATATCCCC |
| P1009 | | |
| ERCAS12A- | 1220 | /5Phos/ACCGAGAATGGAGGTTTACTGAAANNKTACCAGTTAACGTATATCCCCGAT |
| P1010 | | |
| ERCAS12A- | 1221 | /5Phos/GAGAATGGAGGTTTACTGAAAGGANNKCAGTTAACGTATATCCCCGATAAG |
| P1011 | | |
| ERCAS12A- | 1222 | /5Phos/AATGGAGGTTTACTGAAAGGATACNNKTTAACGTATATCCCCGATAAGCTT |
| P1012 | | |
| ERCAS12A- | 1223 | /5Phos/GGAGGTTTACTGAAAGGATACCAGNNKACGTATATCCCCGATAAGCTTAAA |
| P1013 | | |
| ERCAS12A- | 1224 | /5Phos/GGTTTACTGAAAGGATACCAGTTANNKTATATCCCCGATAAGCTTAAAAAC |
| P1014 | | |
| ERCAS12A- | 1225 | /5Phos/TTACTGAAAGGATACCAGTTAACGNNKATCCCCGATAAGCTTAAAAACGTG |
| P1015 | | |
| ERCAS12A- | 1226 | /5Phos/CTGAAAGGATACCAGTTAACGTATNNKCCCGATAAGCTTAAAAACGTGGGC |
| P1016 | | |
| ERCAS12A- | 1227 | /5Phos/AAAGGATACCAGTTAACGTATATCNNKGATAAGCTTAAAAACGTGGGCCAT |
| P1017 | | |
| ERCAS12A- | 1228 | /5Phos/GGATACCAGTTAACGTATATCCCCNNKAAGCTTAAAAACGTGGGCCATCAG |
| P1018 | | |
| ERCAS12A- | 1229 | /5Phos/TACCAGTTAACGTATATCCCCGATNNKCTTAAAAACGTGGGCCATCAGTGT |
| P1019 | | |
| ERCAS12A- | 1230 | /5Phos/CAGTTAACGTATATCCCCGATAAGNNKAAAAACGTGGGCCATCAGTGTGGC |
| P1020 | | |
| ERCAS12A- | 1231 | /5Phos/TTAACGTATATCCCCGATAAGCTTNNKAACGTGGGCCATCAGTGTGGCTGT |
| P1021 | | |
| ERCAS12A- | 1232 | /5Phos/ACGTATATCCCCGATAAGCTTAAANNKGTGGGCCATCAGTGTGGCTGTATT |
| P1022 | | |
| ERCAS12A- | 1233 | /5Phos/TATATCCCCGATAAGCTTAAAAACNNKGGCCATCAGTGTGGCTGTATTTTC |
| P1023 | | |
| ERCAS12A- | 1234 | /5Phos/ATCCCCGATAAGCTTAAAAACGTGNNKCATCAGTGTGGCTGTATTTTCTAT |
| P1024 | | |
| ERCAS12A- | 1235 | /5Phos/CCCGATAAGCTTAAAAACGTGGGCNNKCAGTGTGGCTGTATTTTCTATGTG |
| P1025 | | |
| ERCAS12A- | 1236 | /5Phos/GATAAGCTTAAAAACGTGGGCCATNNKTGTGGCTGTATTTTCTATGTGCCC |
| P1026 | | |
| ERCAS12A- | 1237 | /5Phos/AAGCTTAAAAACGTGGGCCATCAGNNKGGCTGTATTTTCTATGTGCCCGCG |
| P1027 | | |
| ERCAS12A- | 1238 | /5Phos/CTTAAAAACGTGGGCCATCAGTGTNNKTGTATTTTCTATGTGCCCGCGGCA |
| P1028 | | |
| ERCAS12A- | 1239 | /5Phos/AAAAACGTGGGCCATCAGTGTGGCNNKATTTTCTATGTGCCCGCGGCATAT |
| P1029 | | |
| ERCAS12A- | 1240 | /5Phos/AACGTGGGCCATCAGTGTGGCTGTNNKTTCTATGTGCCCGCGGCATATACA |
| P1030 | | |
| ERCAS12A- | 1241 | /5Phos/GTGGGCCATCAGTGTGGCTGTATTNNKTATGTGCCCGCGGCATATACATCA |
| P1031 | | |
| ERCAS12A- | 1242 | /5Phos/GGCCATCAGTGTGGCTGTATTTTCNNKGTGCCCGCGGCATATACATCAAAA |
| P1032 | | |
| ERCAS12A- | 1243 | /5Phos/CATCAGTGTGGCTGTATTTTCTATNNKCCCGCGGCATATACATCAAAAATT |
| P1033 | | |
| ERCAS12A- | 1244 | /5Phos/CAGTGTGGCTGTATTTTCTATGTGNNKGCGGCATATACATCAAAAATTGAC |
| P1034 | | |
| ERCAS12A- | 1245 | /5Phos/TGTGGCTGTATTTTCTATGTGCCCNNKGCATATACATCAAAAATTGACCCG |
| P1035 | | |
| ERCAS12A- | 1246 | /5Phos/GGCTGTATTTTCTATGTGCCCGCGNNKTATACATCAAAAATTGACCCGACG |
| P1036 | | |
| ERCAS12A- | 1247 | /5Phos/TGTATTTTCTATGTGCCCGCGGCANNKACATCAAAAATTGACCCGACGACG |
| P1037 | | |
| ERCAS12A- | 1248 | /5Phos/ATTTTCTATGTGCCCGCGGCATATNNKTCAAAAATTGACCCGACGACGGGT |
| P1038 | | |
| ERCAS12A- | 1249 | /5Phos/TTCTATGTGCCCGCGGCATATACANNKAAAATTGACCCGACGACGGGTTTC |
| P1039 | | |
| ERCAS12A- | 1250 | /5Phos/TATGTGCCCGCGGCATATACATCANNKATTGACCCGACGACGGGTTTCGTT |
| P1040 | | |
| ERCAS12A- | 1251 | /5Phos/GTGCCCGCGGCATATACATCAAAANNKGACCCGACGACGGGTTTCGTTAAT |
| P1041 | | |
| ERCAS12A- | 1252 | /5Phos/CCCGCGGCATATACATCAAAAATTNNKCCGACGACGGGTTTCGTTAATATC |
| P1042 | | |
| ERCAS12A- | 1253 | /5Phos/GCGGCATATACATCAAAAATTGACNNKACGACGGGTTTCGTTAATATCTTC |
| P1043 | | |
| ERCAS12A- | 1254 | /5Phos/GCATATACATCAAAAATTGACCCGNNKACGGGTTTCGTTAATATCTTCAAG |
| P1044 | | |
| ERCAS12A- | 1255 | /5Phos/TATACATCAAAAATTGACCCGACGNNKGGTTTCGTTAATATCTTCAAGTTC |
| P1045 | | |
| ERCAS12A- | 1256 | /5Phos/ACATCAAAAATTGACCCGACGACGNNKTTCGTTAATATCTTCAAGTTCAAA |
| P1046 | | |
| ERCAS12A- | 1257 | /5Phos/TCAAAAATTGACCCGACGACGGGTNNKGTTAATATCTTCAAGTTCAAAGAT |
| P1047 | | |
| ERCAS12A- | 1258 | /5Phos/AAAATTGACCCGACGACGGGTTTCNNKAATATCTTCAAGTTCAAAGATCTG |
| P1048 | | |
| ERCAS12A- | 1259 | /5Phos/ATTGACCCGACGACGGGTTTCGTTNNKATCTTCAAGTTCAAAGATCTGACA |
| P1049 | | |
| ERCAS12A- | 1260 | /5Phos/GACCCGACGACGGGTTTCGTTAATNNKTTCAAGTTCAAAGATCTGACAGTT |
| P1050 | | |
| ERCAS12A- | 1261 | /5Phos/CCGACGACGGGTTTCGTTAATATCNNKAAGTTCAAAGATCTGACAGTTGAT |
| P1051 | | |
| ERCAS12A- | 1262 | /5Phos/ACGACGGGTTTCGTTAATATCTTCNNKTTCAAAGATCTGACAGTTGATGCA |
| P1052 | | |
| ERCAS12A- | 1263 | /5Phos/ACGGGTTTCGTTAATATCTTCAAGNNKAAAGATCTGACAGTTGATGCAAAA |
| P1053 | | |
| ERCAS12A- | 1264 | /5Phos/GGTTTCGTTAATATCTTCAAGTTCNNKGATCTGACAGTTGATGCAAAACGC |
| P1054 | | |
| ERCAS12A- | 1265 | /5Phos/TTCGTTAATATCTTCAAGTTCAAANNKCTGACAGTTGATGCAAAACGCGAA |
| P1055 | | |
| ERCAS12A- | 1266 | /5Phos/GTTAATATCTTCAAGTTCAAAGATNNKACAGTTGATGCAAAACGCGAATTC |
| P1056 | | |
| ERCAS12A- | 1267 | /5Phos/AATATCTTCAAGTTCAAAGATCTGNNKGTTGATGCAAAACGCGAATTCATT |
| P1057 | | |
| ERCAS12A- | 1268 | /5Phos/ATCTTCAAGTTCAAAGATCTGACANNKGATGCAAAACGCGAATTCATTAAG |
| P1058 | | |
| ERCAS12A- | 1269 | /5Phos/TTCAAGTTCAAAGATCTGACAGTTNNKGCAAAACGCGAATTCATTAAGAAG |
| P1059 | | |
| ERCAS12A- | 1270 | /5Phos/AAGTTCAAAGATCTGACAGTTGATNNKAAACGCGAATTCATTAAGAAGTTC |
| P1060 | | |
| ERCAS12A- | 1271 | /5Phos/TTCAAAGATCTGACAGTTGATGCANNKCGCGAATTCATTAAGAAGTTCGAT |
| P1061 | | |
| ERCAS12A- | 1272 | /5Phos/AAAGATCTGACAGTTGATGCAAAANNKGAATTCATTAAGAAGTTCGATAGT |
| P1062 | | |
| ERCAS12A- | 1273 | /5Phos/GATCTGACAGTTGATGCAAAACGCNNKTTCATTAAGAAGTTCGATAGTATT |
| P1063 | | |
| ERCAS12A- | 1274 | /5Phos/CTGACAGTTGATGCAAAACGCGAANNKATTAAGAAGTTCGATAGTATTCGC |
| P1064 | | |
| ERCAS12A- | 1275 | /5Phos/ACAGTTGATGCAAAACGCGAATTCNNKAAGAAGTTCGATAGTATTCGCTAT |
| P1065 | | |
| ERCAS12A- | 1276 | /5Phos/GTTGATGCAAAACGCGAATTCATTNNKAAGTTCGATAGTATTCGCTATGAC |
| P1066 | | |
| ERCAS12A- | 1277 | /5Phos/GATGCAAAACGCGAATTCATTAAGNNKTTCGATAGTATTCGCTATGACTCC |
| P1067 | | |
| ERCAS12A- | 1278 | /5Phos/GCAAAACGCGAATTCATTAAGAAGNNKGATAGTATTCGCTATGACTCCGAG |
| P1068 | | |
| ERCAS12A- | 1279 | /5Phos/AAACGCGAATTCATTAAGAAGTTCNNKAGTATTCGCTATGACTCCGAGAAA |
| P1069 | | |
| ERCAS12A- | 1280 | /5Phos/CGCGAATTCATTAAGAAGTTCGATNNKATTCGCTATGACTCCGAGAAAAAT |
| P1070 | | |
| ERCAS12A- | 1281 | /5Phos/GAATTCATTAAGAAGTTCGATAGTNNKCGCTATGACTCCGAGAAAAATTTG |
| P1071 | | |
| ERCAS12A- | 1282 | /5Phos/TTCATTAAGAAGTTCGATAGTATTNNKTATGACTCCGAGAAAAATTTGTTT |
| P1072 | | |
| ERCAS12A- | 1283 | /5Phos/ATTAAGAAGTTCGATAGTATTCGCNNKGACTCCGAGAAAAATTTGTTTTGC |
| P1073 | | |
| ERCAS12A- | 1284 | /5Phos/AAGAAGTTCGATAGTATTCGCTATNNKTCCGAGAAAAATTTGTTTTGCTTC |
| P1074 | | |
| ERCAS12A- | 1285 | /5Phos/AAGTTCGATAGTATTCGCTATGACNNKGAGAAAAATTTGTTTTGCTTCACT |
| P1075 | | |
| ERCAS12A- | 1286 | /5Phos/TTCGATAGTATTCGCTATGACTCCNNKAAAAATTTGTTTTGCTTCACTTTT |
| P1076 | | |
| ERCAS12A- | 1287 | /5Phos/GATAGTATTCGCTATGACTCCGAGNNKAATTTGTTTTGCTTCACTTTTGAC |
| P1077 | | |
| ERCAS12A- | 1288 | /5Phos/AGTATTCGCTATGACTCCGAGAAANNKTTGTTTTGCTTCACTTTTGACTAC |
| P1078 | | |
| ERCAS12A- | 1289 | /5Phos/ATTCGCTATGACTCCGAGAAAAATNNKTTTTGCTTCACTTTTGACTACAAT |
| P1079 | | |
| ERCAS12A- | 1290 | /5Phos/CGCTATGACTCCGAGAAAAATTTGNNKTGCTTCACTTTTGACTACAATAAC |
| P1080 | | |
| ERCAS12A- | 1291 | /5Phos/TATGACTCCGAGAAAAATTTGTTTNNKTTCACTTTTGACTACAATAACTTT |
| P1081 | | |
| ERCAS12A- | 1292 | /5Phos/GACTCCGAGAAAAATTTGTTTTGCNNKACTTTTGACTACAATAACTTTATT |
| P1082 | | |
| ERCAS12A- | 1293 | /5Phos/TCCGAGAAAAATTTGTTTTGCTTCNNKTTTGACTACAATAACTTTATTACT |
| P1083 | | |
| ERCAS12A- | 1294 | /5Phos/GAGAAAAATTTGTTTTGCTTCACTNNKGACTACAATAACTTTATTACTCAG |
| P1084 | | |
| ERCAS12A- | 1295 | /5Phos/AAAAATTTGTTTTGCTTCACTTTTNNKTACAATAACTTTATTACTCAGAAT |
| P1085 | | |
| ERCAS12A- | 1296 | /5Phos/AATTTGTTTTGCTTCACTTTTGACNNKAATAACTTTATTACTCAGAATACA |
| P1086 | | |
| ERCAS12A- | 1297 | /5Phos/TTGTTTTGCTTCACTTTTGACTACNNKAACTTTATTACTCAGAATACAGTC |
| P1087 | | |
| ERCAS12A- | 1298 | /5Phos/TTTTGCTTCACTTTTGACTACAATNNKTTTATTACTCAGAATACAGTCATG |
| P1088 | | |
| ERCAS12A- | 1299 | /5Phos/TGCTTCACTTTTGACTACAATAACNNKATTACTCAGAATACAGTCATGAGT |
| P1089 | | |
| ERCAS12A- | 1300 | /5Phos/TTCACTTTTGACTACAATAACTTTNNKACTCAGAATACAGTCATGAGTAAA |
| P1090 | | |
| ERCAS12A- | 1301 | /5Phos/ACTTTTGACTACAATAACTTTATTNNKCAGAATACAGTCATGAGTAAAAGC |
| P1091 | | |
| ERCAS12A- | 1302 | /5Phos/TTTGACTACAATAACTTTATTACTNNKAATACAGTCATGAGTAAAAGCTCC |
| P1092 | | |
| ERCAS12A- | 1303 | /5Phos/GACTACAATAACTTTATTACTCAGNNKACAGTCATGAGTAAAAGCTCCTGG |
| P1093 | | |
| ERCAS12A- | 1304 | /5Phos/TACAATAACTTTATTACTCAGAATNNKGTCATGAGTAAAAGCTCCTGGTCG |
| P1094 | | |
| ERCAS12A- | 1305 | /5Phos/AATAACTTTATTACTCAGAATACANNKATGAGTAAAAGCTCCTGGTCGGTT |
| P1095 | | |
| ERCAS12A- | 1306 | /5Phos/AACTTTATTACTCAGAATACAGTCNNKAGTAAAAGCTCCTGGTCGGTTTAC |
| P1096 | | |
| ERCAS12A- | 1307 | /5Phos/TTTATTACTCAGAATACAGTCATGNNKAAAAGCTCCTGGTCGGTTTACACG |
| P1097 | | |
| ERCAS12A- | 1308 | /5Phos/ATTACTCAGAATACAGTCATGAGTNNKAGCTCCTGGTCGGTTTACACGTAC |
| P1098 | | |
| ERCAS12A- | 1309 | /5Phos/ACTCAGAATACAGTCATGAGTAAANNKTCCTGGTCGGTTTACACGTACGGG |
| P1099 | | |
| ERCAS12A- | 1310 | /5Phos/CAGAATACAGTCATGAGTAAAAGCNNKTGGTCGGTTTACACGTACGGGGTA |
| P1100 | | |
| ERCAS12A- | 1311 | /5Phos/AATACAGTCATGAGTAAAAGCTCCNNKTCGGTTTACACGTACGGGGTACGC |
| P1101 | | |
| ERCAS12A- | 1312 | /5Phos/ACAGTCATGAGTAAAAGCTCCTGGNNKGTTTACACGTACGGGGTACGCATC |
| P1102 | | |
| ERCAS12A- | 1313 | /5Phos/GTCATGAGTAAAAGCTCCTGGTCGNNKTACACGTACGGGGTACGCATCAAA |
| P1103 | | |
| ERCAS12A- | 1314 | /5Phos/ATGAGTAAAAGCTCCTGGTCGGTTNNKACGTACGGGGTACGCATCAAACGT |
| P1104 | | |
| ERCAS12A- | 1315 | /5Phos/AGTAAAAGCTCCTGGTCGGTTTACNNKTACGGGGTACGCATCAAACGTCGT |
| P1105 | | |
| ERCAS12A- | 1316 | /5Phos/AAAAGCTCCTGGTCGGTTTACACGNNKGGGGTACGCATCAAACGTCGTTTT |
| P1106 | | |
| ERCAS12A- | 1317 | /5Phos/AGCTCCTGGTCGGTTTACACGTACNNKGTACGCATCAAACGTCGTTTTGTG |
| P1107 | | |
| ERCAS12A- | 1318 | /5Phos/TCCTGGTCGGTTTACACGTACGGGNNKCGCATCAAACGTCGTTTTGTGAAT |
| P1108 | | |
| ERCAS12A- | 1319 | /5Phos/TGGTCGGTTTACACGTACGGGGTANNKATCAAACGTCGTTTTGTGAATGGT |
| P1109 | | |
| ERCAS12A- | 1320 | /5Phos/TCGGTTTACACGTACGGGGTACGCNNKAAACGTCGTTTTGTGAATGGTCGT |
| P1110 | | |
| ERCAS12A- | 1321 | /5Phos/GTTTACACGTACGGGGTACGCATCNNKCGTCGTTTTGTGAATGGTCGTTTT |
| P1111 | | |
| ERCAS12A- | 1322 | /5Phos/TACACGTACGGGGTACGCATCAAANNKCGTTTTGTGAATGGTCGTTTTAGT |
| P1112 | | |
| ERCAS12A- | 1323 | /5Phos/ACGTACGGGGTACGCATCAAACGTNNKTTTGTGAATGGTCGTTTTAGTAAT |
| P1113 | | |
| ERCAS12A- | 1324 | /5Phos/TACGGGGTACGCATCAAACGTCGTNNKGTGAATGGTCGTTTTAGTAATGAG |
| P1114 | | |
| ERCAS12A- | 1325 | /5Phos/GGGGTACGCATCAAACGTCGTTTTNNKAATGGTCGTTTTAGTAATGAGTCG |
| P1115 | | |
| ERCAS12A- | 1326 | /5Phos/GTACGCATCAAACGTCGTTTTGTGNNKGGTCGTTTTAGTAATGAGTCGGAT |
| P1116 | | |
| ERCAS12A- | 1327 | /5Phos/CGCATCAAACGTCGTTTTGTGAATNNKCGTTTTAGTAATGAGTCGGATACA |
| P1117 | | |
| ERCAS12A- | 1328 | /5Phos/ATCAAACGTCGTTTTGTGAATGGTNNKTTTAGTAATGAGTCGGATACAATT |
| P1118 | | |
| ERCAS12A- | 1329 | /5Phos/AAACGTCGTTTTGTGAATGGTCGTNNKAGTAATGAGTCGGATACAATTGAT |
| P1119 | | |
| ERCAS12A- | 1330 | /5Phos/CGTCGTTTTGTGAATGGTCGTTTTNNKAATGAGTCGGATACAATTGATATT |
| P1120 | | |
| ERCAS12A- | 1331 | /5Phos/CGTTTTGTGAATGGTCGTTTTAGTNNKGAGTCGGATACAATTGATATTACC |
| P1121 | | |
| ERCAS12A- | 1332 | /5Phos/TTTGTGAATGGTCGTTTTAGTAATNNKTCGGATACAATTGATATTACCAAG |
| P1122 | | |
| ERCAS12A- | 1333 | /5Phos/GTGAATGGTCGTTTTAGTAATGAGNNKGATACAATTGATATTACCAAGGAT |
| P1123 | | |
| ERCAS12A- | 1334 | /5Phos/AATGGTCGTTTTAGTAATGAGTCGNNKACAATTGATATTACCAAGGATATG |
| P1124 | | |
| ERCAS12A- | 1335 | /5Phos/GGTCGTTTTAGTAATGAGTCGGATNNKATTGATATTACCAAGGATATGGAG |
| P1125 | | |
| ERCAS12A- | 1336 | /5Phos/CGTTTTAGTAATGAGTCGGATACANNKGATATTACCAAGGATATGGAGAAG |
| P1126 | | |
| ERCAS12A- | 1337 | /5Phos/TTTAGTAATGAGTCGGATACAATTNNKATTACCAAGGATATGGAGAAGACT |
| P1127 | | |
| ERCAS12A- | 1338 | /5Phos/AGTAATGAGTCGGATACAATTGATNNKACCAAGGATATGGAGAAGACTCTG |
| P1128 | | |
| ERCAS12A- | 1339 | /5Phos/AATGAGTCGGATACAATTGATATTNNKAAGGATATGGAGAAGACTCTGGAA |
| P1129 | | |
| ERCAS12A- | 1340 | /5Phos/GAGTCGGATACAATTGATATTACCNNKGATATGGAGAAGACTCTGGAAATG |
| P1130 | | |
| ERCAS12A- | 1341 | /5Phos/TCGGATACAATTGATATTACCAAGNNKATGGAGAAGACTCTGGAAATGACA |
| P1131 | | |
| ERCAS12A- | 1342 | /5Phos/GATACAATTGATATTACCAAGGATNNKGAGAAGACTCTGGAAATGACAGAC |
| P1132 | | |
| ERCAS12A- | 1343 | /5Phos/ACAATTGATATTACCAAGGATATGNNKAAGACTCTGGAAATGACAGACATC |
| P1133 | | |
| ERCAS12A- | 1344 | /5Phos/ATTGATATTACCAAGGATATGGAGNNKACTCTGGAAATGACAGACATCAAT |
| P1134 | | |
| ERCAS12A- | 1345 | /5Phos/GATATTACCAAGGATATGGAGAAGNNKCTGGAAATGACAGACATCAATTGG |
| P1135 | | |
| ERCAS12A- | 1346 | /5Phos/ATTACCAAGGATATGGAGAAGACTNNKGAAATGACAGACATCAATTGGCGT |
| P1136 | | |
| ERCAS12A- | 1347 | /5Phos/ACCAAGGATATGGAGAAGACTCTGNNKATGACAGACATCAATTGGCGTGAT |
| P1137 | | |
| ERCAS12A- | 1348 | /5Phos/AAGGATATGGAGAAGACTCTGGAANNKACAGACATCAATTGGCGTGATGGA |
| P1138 | | |
| ERCAS12A- | 1349 | /5Phos/GATATGGAGAAGACTCTGGAAATGNNKGACATCAATTGGCGTGATGGACAT |
| P1139 | | |
| ERCAS12A- | 1350 | /5Phos/ATGGAGAAGACTCTGGAAATGACANNKATCAATTGGCGTGATGGACATGAT |
| P1140 | | |
| ERCAS12A- | 1351 | /5Phos/GAGAAGACTCTGGAAATGACAGACNNKAATTGGCGTGATGGACATGATTTG |
| P1141 | | |
| ERCAS12A- | 1352 | /5Phos/AAGACTCTGGAAATGACAGACATCNNKTGGCGTGATGGACATGATTTGCGT |
| P1142 | | |
| ERCAS12A- | 1353 | /5Phos/ACTCTGGAAATGACAGACATCAATNNKCGTGATGGACATGATTTGCGTCAG |
| P1143 | | |
| ERCAS12A- | 1354 | /5Phos/CTGGAAATGACAGACATCAATTGGNNKGATGGACATGATTTGCGTCAGGAC |
| P1144 | | |
| ERCAS12A- | 1355 | /5Phos/GAAATGACAGACATCAATTGGCGTNNKGGACATGATTTGCGTCAGGACATT |
| P1145 | | |
| ERCAS12A- | 1356 | /5Phos/ATGACAGACATCAATTGGCGTGATNNKCATGATTTGCGTCAGGACATTATC |
| P1146 | | |
| ERCAS12A- | 1357 | /5Phos/ACAGACATCAATTGGCGTGATGGANNKGATTTGCGTCAGGACATTATCGAC |
| P1147 | | |
| ERCAS12A- | 1358 | /5Phos/GACATCAATTGGCGTGATGGACATNNKTTGCGTCAGGACATTATCGACTAT |
| P1148 | | |
| ERCAS12A- | 1359 | /5Phos/ATCAATTGGCGTGATGGACATGATNNKCGTCAGGACATTATCGACTATGAG |
| P1149 | | |
| ERCAS12A- | 1360 | /5Phos/AATTGGCGTGATGGACATGATTTGNNKCAGGACATTATCGACTATGAGATT |
| P1150 | | |
| ERCAS12A- | 1361 | /5Phos/TGGCGTGATGGACATGATTTGCGTNNKGACATTATCGACTATGAGATTGTG |
| P1151 | | |
| ERCAS12A- | 1362 | /5Phos/CGTGATGGACATGATTTGCGTCAGNNKATTATCGACTATGAGATTGTGCAG |
| P1152 | | |
| ERCAS12A- | 1363 | /5Phos/GATGGACATGATTTGCGTCAGGACNNKATCGACTATGAGATTGTGCAGCAT |
| P1153 | | |
| ERCAS12A- | 1364 | /5Phos/GGACATGATTTGCGTCAGGACATTNNKGACTATGAGATTGTGCAGCATATT |
| P1154 | | |
| ERCAS12A- | 1365 | /5Phos/CATGATTTGCGTCAGGACATTATCNNKTATGAGATTGTGCAGCATATTTTC |
| P1155 | | |
| ERCAS12A- | 1366 | /5Phos/GATTTGCGTCAGGACATTATCGACNNKGAGATTGTGCAGCATATTTTCGAA |
| P1156 | | |
| ERCAS12A- | 1367 | /5Phos/TTGCGTCAGGACATTATCGACTATNNKATTGTGCAGCATATTTTCGAAATT |
| P1157 | | |
| ERCAS12A- | 1368 | /5Phos/CGTCAGGACATTATCGACTATGAGNNKGTGCAGCATATTTTCGAAATTTTT |
| P1158 | | |
| ERCAS12A- | 1369 | /5Phos/CAGGACATTATCGACTATGAGATTNNKCAGCATATTTTCGAAATTTTTCGC |
| P1159 | | |
| ERCAS12A- | 1370 | /5Phos/GACATTATCGACTATGAGATTGTGNNKCATATTTTCGAAATTTTTCGCCTG |
| P1160 | | |
| ERCAS12A- | 1371 | /5Phos/ATTATCGACTATGAGATTGTGCAGNNKATTTTCGAAATTTTTCGCCTGACG |
| P1161 | | |
| ERCAS12A- | 1372 | /5Phos/ATCGACTATGAGATTGTGCAGCATNNKTTCGAAATTTTTCGCCTGACGGTG |
| P1162 | | |
| ERCAS12A- | 1373 | /5Phos/GACTATGAGATTGTGCAGCATATTNNKGAAATTTTTCGCCTGACGGTGCAA |
| P1163 | | |
| ERCAS12A- | 1374 | /5Phos/TATGAGATTGTGCAGCATATTTTCNNKATTTTTCGCCTGACGGTGCAAATG |
| P1164 | | |
| ERCAS12A- | 1375 | /5Phos/GAGATTGTGCAGCATATTTTCGAANNKTTTCGCCTGACGGTGCAAATGCGT |
| P1165 | | |
| ERCAS12A- | 1376 | /5Phos/ATTGTGCAGCATATTTTCGAAATTNNKCGCCTGACGGTGCAAATGCGTAAT |
| P1166 | | |
| ERCAS12A- | 1377 | /5Phos/GTGCAGCATATTTTCGAAATTTTTNNKCTGACGGTGCAAATGCGTAATTCC |
| P1167 | | |
| ERCAS12A- | 1378 | /5Phos/CAGCATATTTTCGAAATTTTTCGCNNKACGGTGCAAATGCGTAATTCCTTA |
| P1168 | | |
| ERCAS12A- | 1379 | /5Phos/CATATTTTCGAAATTTTTCGCCTGNNKGTGCAAATGCGTAATTCCTTAAGC |
| P1169 | | |
| ERCAS12A- | 1380 | /5Phos/ATTTTCGAAATTTTTCGCCTGACGNNKCAAATGCGTAATTCCTTAAGCGAA |
| P1170 | | |
| ERCAS12A- | 1381 | /5Phos/TTCGAAATTTTTCGCCTGACGGTGNNKATGCGTAATTCCTTAAGCGAACTG |
| P1171 | | |
| ERCAS12A- | 1382 | /5Phos/GAAATTTTTCGCCTGACGGTGCAANNKCGTAATTCCTTAAGCGAACTGGAA |
| P1172 | | |
| ERCAS12A- | 1383 | /5Phos/ATTTTTCGCCTGACGGTGCAAATGNNKAATTCCTTAAGCGAACTGGAAGAT |
| P1173 | | |
| ERCAS12A- | 1384 | /5Phos/TTTCGCCTGACGGTGCAAATGCGTNNKTCCTTAAGCGAACTGGAAGATCGC |
| P1174 | | |
| ERCAS12A- | 1385 | /5Phos/CGCCTGACGGTGCAAATGCGTAATNNKTTAAGCGAACTGGAAGATCGCGAC |
| P1175 | | |
| ERCAS12A- | 1386 | /5Phos/CTGACGGTGCAAATGCGTAATTCCNNKAGCGAACTGGAAGATCGCGACTAT |
| P1176 | | |
| ERCAS12A- | 1387 | /5Phos/ACGGTGCAAATGCGTAATTCCTTANNKGAACTGGAAGATCGCGACTATGAC |
| P1177 | | |
| ERCAS12A- | 1388 | /5Phos/GTGCAAATGCGTAATTCCTTAAGCNNKCTGGAAGATCGCGACTATGACCGC |
| P1178 | | |
| ERCAS12A- | 1389 | /5Phos/CAAATGCGTAATTCCTTAAGCGAANNKGAAGATCGCGACTATGACCGCTTA |
| P1179 | | |
| ERCAS12A- | 1390 | /5Phos/ATGCGTAATTCCTTAAGCGAACTGNNKGATCGCGACTATGACCGCTTAATT |
| P1180 | | |
| ERCAS12A- | 1391 | /5Phos/CGTAATTCCTTAAGCGAACTGGAANNKCGCGACTATGACCGCTTAATTTCT |
| P1181 | | |
| ERCAS12A- | 1392 | /5Phos/AATTCCTTAAGCGAACTGGAAGATNNKGACTATGACCGCTTAATTTCTCCT |
| P1182 | | |
| ERCAS12A- | 1393 | /5Phos/TCCTTAAGCGAACTGGAAGATCGCNNKTATGACCGCTTAATTTCTCCTGTG |
| P1183 | | |
| ERCAS12A- | 1394 | /5Phos/TTAAGCGAACTGGAAGATCGCGACNNKGACCGCTTAATTTCTCCTGTGCTG |
| P1184 | | |
| ERCAS12A- | 1395 | /5Phos/AGCGAACTGGAAGATCGCGACTATNNKCGCTTAATTTCTCCTGTGCTGAAT |
| P1185 | | |
| ERCAS12A- | 1396 | /5Phos/GAACTGGAAGATCGCGACTATGACNNKTTAATTTCTCCTGTGCTGAATGAG |
| P1186 | | |
| ERCAS12A- | 1397 | /5Phos/CTGGAAGATCGCGACTATGACCGCNNKATTTCTCCTGTGCTGAATGAGAAC |
| P1187 | | |
| ERCAS12A- | 1398 | /5Phos/GAAGATCGCGACTATGACCGCTTANNKTCTCCTGTGCTGAATGAGAACAAC |
| P1188 | | |
| ERCAS12A- | 1399 | /5Phos/GATCGCGACTATGACCGCTTAATTNNKCCTGTGCTGAATGAGAACAACATC |
| P1189 | | |
| ERCAS12A- | 1400 | /5Phos/CGCGACTATGACCGCTTAATTTCTNNKGTGCTGAATGAGAACAACATCTTC |
| P1190 | | |
| ERCAS12A- | 1401 | /5Phos/GACTATGACCGCTTAATTTCTCCTNNKCTGAATGAGAACAACATCTTCTAT |
| P1191 | | |
| ERCAS12A- | 1402 | /5Phos/TATGACCGCTTAATTTCTCCTGTGNNKAATGAGAACAACATCTTCTATGAC |
| P1192 | | |
| ERCAS12A- | 1403 | /5Phos/GACCGCTTAATTTCTCCTGTGCTGNNKGAGAACAACATCTTCTATGACTCA |
| P1193 | | |
| ERCAS12A- | 1404 | /5Phos/CGCTTAATTTCTCCTGTGCTGAATNNKAACAACATCTTCTATGACTCAGCG |
| P1194 | | |
| ERCAS12A- | 1405 | /5Phos/TTAATTTCTCCTGTGCTGAATGAGNNKAACATCTTCTATGACTCAGCGAAA |
| P1195 | | |
| ERCAS12A- | 1406 | /5Phos/ATTTCTCCTGTGCTGAATGAGAACNNKATCTTCTATGACTCAGCGAAAGCC |
| P1196 | | |
| ERCAS12A- | 1407 | /5Phos/TCTCCTGTGCTGAATGAGAACAACNNKTTCTATGACTCAGCGAAAGCCGGG |
| P1197 | | |
| ERCAS12A- | 1408 | /5Phos/CCTGTGCTGAATGAGAACAACATCNNKTATGACTCAGCGAAAGCCGGGGAC |
| P1198 | | |
| ERCAS12A- | 1409 | /5Phos/GTGCTGAATGAGAACAACATCTTCNNKGACTCAGCGAAAGCCGGGGACGCT |
| P1199 | | |
| ERCAS12A- | 1410 | /5Phos/CTGAATGAGAACAACATCTTCTATNNKTCAGCGAAAGCCGGGGACGCTTTG |
| P1200 | | |
| ERCAS12A- | 1411 | /5Phos/AATGAGAACAACATCTTCTATGACNNKGCGAAAGCCGGGGACGCTTTGCCA |
| P1201 | | |
| ERCAS12A- | 1412 | /5Phos/GAGAACAACATCTTCTATGACTCANNKAAAGCCGGGGACGCTTTGCCAAAG |
| P1202 | | |
| ERCAS12A- | 1413 | /5Phos/AACAACATCTTCTATGACTCAGCGNNKGCCGGGGACGCTTTGCCAAAGGAT |
| P1203 | | |
| ERCAS12A- | 1414 | /5Phos/AACATCTTCTATGACTCAGCGAAANNKGGGGACGCTTTGCCAAAGGATGCA |
| P1204 | | |
| ERCAS12A- | 1415 | /5Phos/ATCTTCTATGACTCAGCGAAAGCCNNKGACGCTTTGCCAAAGGATGCAGAT |
| P1205 | | |
| ERCAS12A- | 1416 | /5Phos/TTCTATGACTCAGCGAAAGCCGGGNNKGCTTTGCCAAAGGATGCAGATGCT |
| P1206 | | |
| ERCAS12A- | 1417 | /5Phos/TATGACTCAGCGAAAGCCGGGGACNNKTTGCCAAAGGATGCAGATGCTAAC |
| P1207 | | |
| ERCAS12A- | 1418 | /5Phos/GACTCAGCGAAAGCCGGGGACGCTNNKCCAAAGGATGCAGATGCTAACGGT |
| P1208 | | |
| ERCAS12A- | 1419 | /5Phos/TCAGCGAAAGCCGGGGACGCTTTGNNKAAGGATGCAGATGCTAACGGTGCA |
| P1209 | | |
| ERCAS12A- | 1420 | /5Phos/GCGAAAGCCGGGGACGCTTTGCCANNKGATGCAGATGCTAACGGTGCATAT |
| P1210 | | |
| ERCAS12A- | 1421 | /5Phos/AAAGCCGGGGACGCTTTGCCAAAGNNKGCAGATGCTAACGGTGCATATTGT |
| P1211 | | |
| ERCAS12A- | 1422 | /5Phos/GCCGGGGACGCTTTGCCAAAGGATNNKGATGCTAACGGTGCATATTGTATT |
| P1212 | | |
| ERCAS12A- | 1423 | /5Phos/GGGGACGCTTTGCCAAAGGATGCANNKGCTAACGGTGCATATTGTATTGCT |
| P1213 | | |
| ERCAS12A- | 1424 | /5Phos/GACGCTTTGCCAAAGGATGCAGATNNKAACGGTGCATATTGTATTGCTCTG |
| P1214 | | |
| ERCAS12A- | 1425 | /5Phos/GCTTTGCCAAAGGATGCAGATGCTNNKGGTGCATATTGTATTGCTCTGAAA |
| P1215 | | |
| ERCAS12A- | 1426 | /5Phos/TTGCCAAAGGATGCAGATGCTAACNNKGCATATTGTATTGCTCTGAAAGGC |
| P1216 | | |
| ERCAS12A- | 1427 | /5Phos/CCAAAGGATGCAGATGCTAACGGTNNKTATTGTATTGCTCTGAAAGGCCTT |
| P1217 | | |
| ERCAS12A- | 1428 | /5Phos/AAGGATGCAGATGCTAACGGTGCANNKTGTATTGCTCTGAAAGGCCTTTAC |
| P1218 | | |
| ERCAS12A- | 1429 | /5Phos/GATGCAGATGCTAACGGTGCATATNNKATTGCTCTGAAAGGCCTTTACGAG |
| P1219 | | |
| ERCAS12A- | 1430 | /5Phos/GCAGATGCTAACGGTGCATATTGTNNKGCTCTGAAAGGCCTTTACGAGATC |
| P1220 | | |
| ERCAS12A- | 1431 | /5Phos/GATGCTAACGGTGCATATTGTATTNNKCTGAAAGGCCTTTACGAGATCAAA |
| P1221 | | |
| ERCAS12A- | 1432 | /5Phos/GCTAACGGTGCATATTGTATTGCTNNKAAAGGCCTTTACGAGATCAAACAA |
| P1222 | | |
| ERCAS12A- | 1433 | /5Phos/AACGGTGCATATTGTATTGCTCTGNNKGGCCTTTACGAGATCAAACAAATT |
| P1223 | | |
| ERCAS12A- | 1434 | /5Phos/GGTGCATATTGTATTGCTCTGAAANNKCTTTACGAGATCAAACAAATTACT |
| P1224 | | |
| ERCAS12A- | 1435 | /5Phos/GCATATTGTATTGCTCTGAAAGGCNNKTACGAGATCAAACAAATTACTGAA |
| P1225 | | |
| ERCAS12A- | 1436 | /5Phos/TATTGTATTGCTCTGAAAGGCCTTNNKGAGATCAAACAAATTACTGAAAAC |
| P1226 | | |
| ERCAS12A- | 1437 | /5Phos/TGTATTGCTCTGAAAGGCCTTTACNNKATCAAACAAATTACTGAAAACTGG |
| P1227 | | |
| ERCAS12A- | 1438 | /5Phos/ATTGCTCTGAAAGGCCTTTACGAGNNKAAACAAATTACTGAAAACTGGAAG |
| P1228 | | |
| ERCAS12A- | 1439 | /5Phos/GCTCTGAAAGGCCTTTACGAGATCNNKCAAATTACTGAAAACTGGAAGGAA |
| P1229 | | |
| ERCAS12A- | 1440 | /5Phos/CTGAAAGGCCTTTACGAGATCAAANNKATTACTGAAAACTGGAAGGAAGAT |
| P1230 | | |
| ERCAS12A- | 1441 | /5Phos/AAAGGCCTTTACGAGATCAAACAANNKACTGAAAACTGGAAGGAAGATGGA |
| P1231 | | |
| ERCAS12A- | 1442 | /5Phos/GGCCTTTACGAGATCAAACAAATTNNKGAAAACTGGAAGGAAGATGGAAAG |
| P1232 | | |
| ERCAS12A- | 1443 | /5Phos/CTTTACGAGATCAAACAAATTACTNNKAACTGGAAGGAAGATGGAAAGTTT |
| P1233 | | |
| ERCAS12A- | 1444 | /5Phos/TACGAGATCAAACAAATTACTGAANNKTGGAAGGAAGATGGAAAGTTTTCC |
| P1234 | | |
| ERCAS12A- | 1445 | /5Phos/GAGATCAAACAAATTACTGAAAACNNKAAGGAAGATGGAAAGTTTTCCCGT |
| P1235 | | |
| ERCAS12A- | 1446 | /5Phos/ATCAAACAAATTACTGAAAACTGGNNKGAAGATGGAAAGTTTTCCCGTGAT |
| P1236 | | |
| ERCAS12A- | 1447 | /5Phos/AAACAAATTACTGAAAACTGGAAGNNKGATGGAAAGTTTTCCCGTGATAAA |
| P1237 | | |
| ERCAS12A- | 1448 | /5Phos/CAAATTACTGAAAACTGGAAGGAANNKGGAAAGTTTTCCCGTGATAAATTG |
| P1238 | | |
| ERCAS12A- | 1449 | /5Phos/ATTACTGAAAACTGGAAGGAAGATNNKAAGTTTTCCCGTGATAAATTGAAG |
| P1239 | | |
| ERCAS12A- | 1450 | /5Phos/ACTGAAAACTGGAAGGAAGATGGANNKTTTTCCCGTGATAAATTGAAGATC |
| P1240 | | |
| ERCAS12A- | 1451 | /5Phos/GAAAACTGGAAGGAAGATGGAAAGNNKTCCCGTGATAAATTGAAGATCTCT |
| P1241 | | |
| ERCAS12A- | 1452 | /5Phos/AACTGGAAGGAAGATGGAAAGTTTNNKCGTGATAAATTGAAGATCTCTAAT |
| P1242 | | |
| ERCAS12A- | 1453 | /5Phos/TGGAAGGAAGATGGAAAGTTTTCCNNKGATAAATTGAAGATCTCTAATAAG |
| P1243 | | |
| ERCAS12A- | 1454 | /5Phos/AAGGAAGATGGAAAGTTTTCCCGTNNKAAATTGAAGATCTCTAATAAGGAC |
| P1244 | | |
| ERCAS12A- | 1455 | /5Phos/GAAGATGGAAAGTTTTCCCGTGATNNKTTGAAGATCTCTAATAAGGACTGG |
| P1245 | | |
| ERCAS12A- | 1456 | /5Phos/GATGGAAAGTTTTCCCGTGATAAANNKAAGATCTCTAATAAGGACTGGTTT |
| P1246 | | |
| ERCAS12A- | 1457 | /5Phos/GGAAAGTTTTCCCGTGATAAATTGNNKATCTCTAATAAGGACTGGTTTGAC |
| P1247 | | |
| ERCAS12A- | 1458 | /5Phos/AAGTTTTCCCGTGATAAATTGAAGNNKTCTAATAAGGACTGGTTTGACTTT |
| P1248 | | |
| ERCAS12A- | 1459 | /5Phos/TTTTCCCGTGATAAATTGAAGATCNNKAATAAGGACTGGTTTGACTTTATC |
| P1249 | | |
| ERCAS12A- | 1460 | /5Phos/TCCCGTGATAAATTGAAGATCTCTNNKAAGGACTGGTTTGACTTTATCCAA |
| P1250 | | |
| ERCAS12A- | 1461 | /5Phos/CGTGATAAATTGAAGATCTCTAATNNKGACTGGTTTGACTTTATCCAAAAT |
| P1251 | | |
| ERCAS12A- | 1462 | /5Phos/GATAAATTGAAGATCTCTAATAAGNNKTGGTTTGACTTTATCCAAAATAAA |
| P1252 | | |
| ERCAS12A- | 1463 | /5Phos/AAATTGAAGATCTCTAATAAGGACNNKTTTGACTTTATCCAAAATAAACGT |
| P1253 | | |
| ERCAS12A- | 1464 | /5Phos/TTGAAGATCTCTAATAAGGACTGGNNKGACTTTATCCAAAATAAACGTTAT |
| P1254 | | |
| ERCAS12A- | 1465 | /5Phos/AAGATCTCTAATAAGGACTGGTTTNNKTTTATCCAAAATAAACGTTATTTA |
| P1255 | | |
| ERCAS12A- | 1466 | /5Phos/ATCTCTAATAAGGACTGGTTTGACNNKATCCAAAATAAACGTTATTTAGGT |
| P1256 | | |
| ERCAS12A- | 1467 | /5Phos/TCTAATAAGGACTGGTTTGACTTTNNKCAAAATAAACGTTATTTAGGTCGT |
| P1257 | | |
| ERCAS12A- | 1468 | /5Phos/AATAAGGACTGGTTTGACTTTATCNNKAATAAACGTTATTTAGGTCGTAGC |
| P1258 | | |
| ERCAS12A- | 1469 | /5Phos/AAGGACTGGTTTGACTTTATCCAANNKAAACGTTATTTAGGTCGTAGCAGT |
| P1259 | | |
| ERCAS12A- | 1470 | /5Phos/GACTGGTTTGACTTTATCCAAAATNNKCGTTATTTAGGTCGTAGCAGTGAT |
| P1260 | | |
| ERCAS12A- | 1471 | /5Phos/TGGTTTGACTTTATCCAAAATAAANNKTATTTAGGTCGTAGCAGTGATGAT |
| P1261 | | |
| ERCAS12A- | 1472 | /5Phos/TTTGACTTTATCCAAAATAAACGTNNKTTAGGTCGTAGCAGTGATGATGAA |
| P1262 | | |
| ERCAS12A- | 1473 | /5Phos/GACTTTATCCAAAATAAACGTTATNNKGGTCGTAGCAGTGATGATGAAGCA |
| P1263 | | |

### Example 3

### Editing Efficiency of ErCas12a Variants in Human Cells

[0149] This example evaluates the DNA cleavage activity of 20 ErCas12a point mutations in the context of E. coli (FIG. 7). The cleavage activity of each mutant was quantified by calculating the survival rate of E. coli with or without the induction of toxic reporter gene. Compared to WT-ERCAS12A, 31 out of 40 point mutations showed improved DNA cleavage, thus further validating the result of sequencing based, high-throughput phenotype measurement in Example 1.

[0150] Eight representative ERCAS12A point mutations were selected for further characterization in human cells. These point mutations included 135L, G39Q, 140Q, S469K, Y507S, K516P, T826F and Y907V. Site directed mutagenesis was performed to introduce specific point mutations on the expression vector using primers listed in Table 4. Each protein was expressed in E. coli BL21DE3 cells, sequentially purified using nickel-affinity and heparin chromatography. To evaluate the genome editing efficiency of each variant, ERCAS12A-RNPs were assembled using 6 crRNAs targeting human HPRT gene (Table 5). The assembled RNPs (50 nM or 200 nM) were delivered into HEK293 cells by Lonza nucleofection (SF buffer, DS-150 program), and the editing efficiency was measured by T7 endonuclease I assay (T7EI) 48-hours post delivery (FIG. 8A-B). To facilitate the comparison, the efficiency of variant at each target was normalized to WT-ERCAS12A and presented as fold-improvement over WT (FIG. 8C-D). The single mutant variants showed improved activity over WT at one or multiple sites, especially at low RNP concentration (50 nM, FIG. 8B, D).

TABLE 4
Primers for Site Directed Mutagenesis of ErCas12a

| | SEQ ID | |
|---|---|---|
| Mutation | NO | DNA Primers (5′→3′) |
| I35L Fwd | 1474 | ACTGAGACAACACAGCAGTTCCTGGTTAAAAACGGCATCATTAAAGAAGATG |
| I35L Rev | 1475 | CATCTTCTTTAATGATGCCGTTTTTAACCAGGAACTGCTGTGTTGTCTCAGT |
| G39Q Fwd | 1476 | CACAGCAGTTCATCGTTAAAAACCAGATCATTAAAGAAGATGAGCTGCG |
| G39Q Rev | 1477 | CGCAGCTCATCTTCTTTAATGATCTGGTTTTTAACGATGAACTGCTGTG |
| I40Q Fwd | 1478 | CAGTTCATCGTTAAAAACGGCCAGATTAAAGAAGATGAGCTGCGC |
| I40Q Rev | 1479 | GCGCAGCTCATCTTCTTTAATCTGGCCGTTTTTAACGATGAACTG |
| S469K Fwd | 1480 | ACGCCTTCCATTGGTGCAAAGTGTTTATGACAGAGGAGTTAGTAGA |
| S469K Rev | 1481 | TCTACTAACTCCTCTGTCATAAACACTTTGCACCAATGGAAGGCGT |
| Y507S Fwd | 1482 | GATTTCACTGTATAACTTAGTCCGTAATAGCGTCACTCAGAAGCCGTACTC |
| Y507S Rev | 1483 | GAGTACGGCTTCTGAGTGACGCTATTACGGACTAAGTTATACAGTGAAATC |
| K516P Fwd | 1484 | TCAGAAGCCGTACTCAACTCCGAAGATCAAGTTAAATTTTGGAATTCCGA |
| K516P Rev | 1485 | TCGGAATTCCAAAATTTAACTTGATCTTCGGAGTTGAGTACGGCTTCTGA |
| T826F Fwd | 1486 | GTCACCACGAAGCAGCATTTAACATTGTGAAAGACTATCGCTAC |
| T826F Rev | 1487 | GTAGCGATAGTCTTTCACAATGTTAAATGCTGCTTCGTGGTGAC |
| Y907V Fwd | 1488 | AGCAAAAGTCTTTTAATATCGTTAATGGTGTGGACTACCAAATTAAGCTTAAACAA |
| | | CAGG |
| Y907V Rev | 1489 | CCTGTTGTTTAAGCTTAATTTGGTAGTCCACACCATTAACGATATTAAAAGACTTT |
| | | TGCT |

TABLE 5
crRNA and Primer Sequences for T7E1 Assay

| | SEQ ID | |
|---|---|---|
| crRNA | NO | crRNA RNA Sequences (5′→3′) |
| crRNA-1 | 1490 | UUAAUUUCUACUCUUGUAGAUCUUGGGUGUGUUAAAAGUGAC |
| crRNA-2 | 1491 | UUAAUUUCUACUCUUGUAGAUAUCCGUGCUGAGUGUACCAUG |
| crRNA-3 | 1492 | UUAAUUUCUACUCUUGUAGAUUAAUGCCCUGUAGUCUCUCUG |
| crRNA-4 | 1493 | UUAAUUUCUACUCUUGUAGAUUAAUUAACAGCUUGCUGGUGA |
| crRNA-5 | 1494 | UUAAUUUCUACUCUUGUAGAUUGUGAAAUGGCUUAUAAUUGC |
| crRNA-6 | 1495 | UUAAUUUCUACUCUUGUAGAUUUGUAGGAUAUGCCCUUGACU |
| | | DNA Primer Sequences (5′→3′) |
| HPRT7 Fwd | 1496 | AAGAATGTTGTGATAAAAGGTGATGCT |
| HPRT7 Rev | 1497 | ACACATCCATGGGACTTCTGCCTC |

### Example 4

### Editing Efficiency of ErCas12 Variants in Human Cells

[0151] This example evaluates the editing efficiency of 42 additional ErCas12a point mutations selected based on previous E. coli screen data. Site directed mutagenesis was performed to introduce specific point mutations on the expression vector using primers listed in Table 6. Purified plasmids were lipofected into human HEK293 cells with 2 crRNAs targeting human HPRT gene (Table 7). The editing efficiency of HPRT was measured by T7EI assay 2 days post-delivery. To facilitate the comparison, the efficiency of variant at each target was normalized to WT ERCAS12A and presented as fold-improvement over WT (FIG. 9). 21 of 42 mutants improved the on-targeting efficiency of ERCAS12A when delivered as plasmid (FIG. 8, Table 7). Four point mutations, including S158G, D303R, F465R, and F840L, were selected for further characterization as RNP. 3 out of 4 mutations (D303R, F465R, F840L) improved the on-target editing efficiency in nearly all target sites (FIG. 8B-C).

TABLE 6
Primers for Site Directed Mutagenesis of ERCAS12A

| | SEQ ID | |
|---|---|---|
| Mutation | NO | Fwd Primers (5′→3′) |
| Q18V Fwd | 1498 | ATCGGCATCAGCAGCCTGGTGAAAACCCTGCGGAACGCT |
| Q18V Rev | 1499 | AGCGTTCCGCAGGGTTTTCACCAGGCTGCTGATGCCGAT |
| D56R Fwd | 1500 | CGAGAACCGGCAGATCCTGAAGCGGATCATGGACGACTACTACCGGG |
| D56R Rev | 1501 | CCCGGTAGTAGTCGTCCATGATCCGCTTCAGGATCTGCCGGTTCTCG |
| D59A Fwd | 1502 | GCAGATCCTGAAGGACATCATGGCCGACTACTACCGGGGCTTCATCA |
| D59A Rev | 1503 | TGATGAAGCCCCGGTAGTAGTCGGCCATGATGTCCTTCAGGATCTGC |
| S158G Fwd | 1504 | AGAAAACCCAAGTCATCAAGCTGTTCGGCAGATTCGCCACCAGCTTCAA |
| S158G Rev | 1505 | TTGAAGCTGGTGGCGAATCTGCCGAACAGCTTGATGACTTGGGTTTTCT |
| K165Y Fwd | 1506 | GCAGATTCGCCACCAGCTTCTACGACTACTTCAAGAACCGGGCCAAC |
| K165Y Rev | 1507 | GTTGGCCCGGTTCTTGAAGTAGTCGTAGAAGCTGGTGGCGAATCTGC |
| D178R Fwd | 1508 | GCCAACTGCTTCAGCGCCCGGGATATCAGCAGCAGCTCCTGC |
| D178R Rev | 1509 | GCAGGAGCTGCTGCTGATATCCCGGGCGCTGAAGCAGTTGGC |
| S181V Fwd | 1510 | GCTTCAGCGCCGACGATATCGTGAGCAGCTCCTGCCACAGA |
| S181V Rev | 1511 | TCTGTGGCAGGAGCTGCTCACGATATCGTCGGCGCTGAAGC |
| A290K Fwd | 1512 | GCTGCACAAGCAGATTCTGTGTATCAAGGACACCTCCTACGAGGTGCC |
| A290K Rev | 1513 | GGCACCTCGTAGGAGGTGTCCTTGATACACAGAATCTGCTTGTGCAGC |
| V296R Fwd | 1514 | TCGCCGACACCTCCTACGAGCGGCCCTACAAGTTCGAGAGCGAC |
| V296R Rev | 1515 | GTCGCTCTCGAACTTGTAGGGCCGCTCGTAGGAGGTGTCGGCGA |
| P297V Fwd | 1516 | CCGACACCTCCTACGAGGTGGTGTACAAGTTCGAGAGCGACGAAGAG |
| P297V Rev | 1517 | CTCTTCGTCGCTCTCGAACTTGTACACCACCTCGTAGGAGGTGTCGG |
| P297R Fwd | 1518 | CCGACACCTCCTACGAGGTGCGGTACAAGTTCGAGAGCGACGAAGAG |
| P297R Rev | 1519 | CTCTTCGTCGCTCTCGAACTTGTACCGCACCTCGTAGGAGGTGTCGG |
| Y298R Fwd | 1520 | CACCTCCTACGAGGTGCCCCGGAAGTTCGAGAGCGACGAAGAGG |
| Y298R Rev | 1521 | CCTCTTCGTCGCTCTCGAACTTCCGGGGCACCTCGTAGGAGGTG |
| D303R Fwd | 1522 | GTGCCCTACAAGTTCGAGAGCCGGGAAGAGGTGTACCAGAGCGT |
| D303R Rev | 1523 | ACGCTCTGGTACACCTCTTCCCGGCTCTCGAACTTGTAGGGCAC |
| E305K Fwd | 1524 | CCTACAAGTTCGAGAGCGACGAAAAGGTGTACCAGAGCGTGAAC |
| E305K Rev | 1525 | GTTCACGCTCTGGTACACCTTTTCGTCGCTCTCGAACTTGTAGG |
| Y307K Fwd | 1526 | TTCGAGAGCGACGAAGAGGTGAAGCAGAGCGTGAACGGCTTC |
| Y307K Rev | 1527 | GAAGCCGTTCACGCTCTGCTTCACCTCTTCGTCGCTCTCGAA |
| Q353R Fwd | 1528 | AAGTTCTACGAGAGCGTGTCCCGGAAAACCTACAGAGACTGGGAGAC |
| Q353R Rev | 1529 | GTCTCCCAGTCTCTGTAGGTTTTCCGGGACACGCTCTCGTAGAACTT |
| F465R Fwd | 1530 | TGGACGTGATCATGAACGCCCGGCACTGGTGCAGCGTGTTC |
| F465R Rev | 1531 | GAACACGCTGCACCAGTGCCGGGCGTTCATGATCACGTCCA |
| V470K Fwd | 1532 | GCCTTCCACTGGTGCAGCAAGTTCATGACCGAGGAACTGGTG |
| V470K Rev | 1533 | CACCAGTTCCTCGGTCATGAACTTGCTGCACCAGTGGAAGGC |
| Y507R Fwd | 1534 | GTACAACCTCGTGCGGAACCGGGTGACCCAGAAGCCTTACAG |
| Y507R Rev | 1535 | CTGTAAGGCTTCTGGGTCACCCGGTTCCGCACGAGGTTGTAC |
| P512V Fwd | 1536 | CGGAACTACGTGACCCAGAAGGTGTACAGCACCAAGAAGATCAAGCT |
| P512V Rev | 1537 | AGCTTGATCTTCTTGGTGCTGTACACCTTCTGGGTCACGTAGTTCCG |
| Y513R Fwd | 1538 | CTACGTGACCCAGAAGCCTCGGAGCACCAAGAAGATCAAGCTG |
| Y513R Rev | 1539 | CAGCTTGATCTTCTTGGTGCTCCGAGGCTTCTGGGTCACGTAG |
| S514R Fwd | 1540 | CTACGTGACCCAGAAGCCTTACCGGACCAAGAAGATCAAGCTGAACTTC |
| S514R Rev | 1541 | GAAGTTCAGCTTGATCTTCTTGGTCCGGTAAGGCTTCTGGGTCACGTAG |
| K516R Fwd | 1542 | CCCAGAAGCCTTACAGCACCCGGAAGATCAAGCTGAACTTCGGC |
| K516R Rev | 1543 | GCCGAAGTTCAGCTTGATCTTCCGGGTGCTGTAAGGCTTCTGGG |
| G553M Fwd | 1544 | GCGGGACAATCTGTACTACCTGATGATCTTCAACGCCAAGAACAAGC |
| G553M Rev | 1545 | GCTTGTTCTTGGCGTTGAAGATCATCAGGTAGTACAGATTGTCCCGC |
| A541K Fwd | 1546 | AAGAGCAAAGAGTACAGCAACAACGTGATCATCCTGATGCGGGACAA |
| A541K Rev | 1547 | TTGTCCCGCATCAGGATGATCACGTTGTTGCTGTACTCTTTGCTCTT |
| D562K Fwd | 1548 | TCAACGCCAAGAACAAGCCCAAGAAGAAGATTATCGAGGGCAACAC |
| D562K Rev | 1549 | GTGTTGCCCTCGATAATCTTCTTCTTGGGCTTGTTCTTGGCGTTGA |
| N583V Fwd | 1550 | GGCGACTACAAGAAGATGATCTATGTGCTGCTGCCTGGGCCG |
| N583V Rev | 1551 | CGGCCCAGGCAGCAGCACATAGATCATCTTCTTGTAGTCGCC |
| L585K Fwd | 1552 | GCGACTACAAGAAGATGATCTATAACCTGAAGCCTGGGCCGAACAAGATG |
| L585K Rev | 1553 | CATCTTGTTCGGCCCAGGCTTCAGGTTATAGATCATCTTCTTGTAGTCGC |
| F653R Fwd | 1554 | CCATCCATCCAGAGTGGAAGAATCGGGGCTTCGACTTCAGCGAC |
| F653R Rev | 1555 | GTCGCTGAAGTCGAAGCCCCGATTCTTCCACTCTGGATGGATGG |
| K712R Fwd | 1556 | CAGATCTACAACAAAGACTTCAGCAAGCGGTCCACCGGCAACGACAA |
| K712R Rev | 1557 | TTGTCGTTGCCGGTGGACCGCTTGCTGAAGTCTTTGTTGTAGATCTG |
| N716R Fwd | 1558 | AGCAAGAAGTCCACCGGCCGGGACAACCTGCACACCATGTAC |
| N716R Rev | 1559 | GTACATGGTGTGCAGGTTGTCCCGGCCGGTGGACTTCTTGCT |
| A744N Fwd | 1560 | CTGAAGCTGAACGGCGAGAACGAGATTTTTTTCAGAAAGTCCAGCATC |
| A744N Rev | 1561 | GATGCTGGACTTTCTGAAAAAAATCTCGTTCTCGCCGTTCAGCTTCAG |
| A744T Fwd | 1562 | CTGAAGCTGAACGGCGAGACCGAGATTTTTTTCAGAAAGTCCAGCATC |
| A744T Rev | 1563 | GATGCTGGACTTTCTGAAAAAAATCTCGGTCTCGCCGTTCAGCTTCAG |
| F748A Fwd | 1564 | CGGCGAGGCCGAGATTTTTGCCAGAAAGTCCAGCATCAAGAACC |
| F748A Rev | 1565 | GGTTCTTGATGCTGGACTTTCTGGCAAAAATCTCGGCCTCGCCG |
| S751A Fwd | 1566 | CGAGGCCGAGATTTTTTTCAGAAAGGCCAGCATCAAGAACCCCATCAT |
| S751A Rev | 1567 | ATGATGGGGTTCTTGATGCTGGCCTTTCTGAAAAAAATCTCGGCCTCG |
| I757K Fwd | 1568 | AGTCCAGCATCAAGAACCCCAAGATCCACAAAAAGGGCAGCAT |
| I757K Rev | 1569 | ATGCTGCCCTTTTTGTGGATCTTGGGGTTCTTGATGCTGGACT |
| E771R Fwd | 1570 | CATCCTGGTCAACCGGACATACCGGGCCGAAGAGAAGGATCAGTTCG |
| E771R Rev | 1571 | CGAACTGATCCTTCTCTTCGGCCCGGTATGTCCGGTTGACCAGGATG |
| T826K Fwd | 1572 | CACCACGAAGCCGCCAAGAATATCGTGAAGGACTACCGGT |
| T826K Rev | 1573 | ACCGGTAGTCCTTCACGATATTCTTGGCGGCTTCGTGGTG |
| F840L Fwd | 1574 | ACTATCGCTACACTTACGATAAGTACCTGTTACATATGCCTATTACGATTAACTT |
| | | TAAGG |
| F840L Rev | 1575 | CCTTAAAGTTAATCGTAATAGGCATATGTAACAGGTACTTATCGTAAGTGTAGCG |
| | | ATAGT |
| E935R Fwd | 1576 | GGAAAGAGATCGGCAAGATCAAACGGATCAAAGAGGGCTACCTGAGC |
| E935R Rev | 1577 | GCTCAGGTAGCCCTCTTTGATCCGTTTGATCTTGCCGATCTCTTTCC |
| I936R Fwd | 1578 | GAAAGAGATCGGCAAGATCAAAGAACGGAAAGAGGGCTACCTGAGCC |
| I936R Rev | 1579 | GGCTCAGGTAGCCCTCTTTCCGTTCTTTGATCTTGCCGATCTCTTTC |
| K1019V Fwd | 1580 | CTGACCTACATTCCCGACGTGCTGAAAAACGTGGGCCACCA |
| K1019V Rev | 1581 | TGGTGGCCCACGTTTTTCAGCACGTCGGGAATGTAGGTCAG |

TABLE 7
crRNA and Primer Sequences for T7E1 Assay

| | SEQ ID | |
|---|---|---|
| crRNA | NO | crRNA RNA Sequences (5′→3′) |
| crRNA-1 | 1490 | UUAAUUUCUACUCUUGUAGAUCUUGGGUGUGUUAAAAGUGAC |
| crRNA-2 | 1491 | UUAAUUUCUACUCUUGUAGAUAUCCGUGCUGAGUGUACCAUG |
| crRNA-3 | 1492 | UUAAUUUCUACUCUUGUAGAUUAAUGCCCUGUAGUCUCUCUG |
| crRNA-4 | 1493 | UUAAUUUCUACUCUUGUAGAUUAAUUAACAGCUUGCUGGUGA |
| crRNA-5 | 1494 | UUAAUUUCUACUCUUGUAGAUUGUGAAAUGGCUUAUAAUUGC |
| crRNA-6 | 1495 | UUAAUUUCUACUCUUGUAGAUUUGUAGGAUAUGCCCUUGACU |
| | | DNA Primer Sequences (5'->3') |
| HPRT7 Fwd | 1496 | AAGAATGTTGTGATAAAAGGTGATGCT |
| HPRT7 Rev | 1497 | ACACATCCATGGGACTTCTGCCTC |

[0152] With a large collection of single point mutations with enhanced activity available, mutations were combined or “stacked” to further improve the activity of ERCAS12A. The point mutations described in previous examples were stacked in 9 combinations and the editing efficiency of these ERCAS12A variants were evaluated in human cells as RNPs (FIG. 9A-B). Notably, all stacked variants enhanced the on-target editing efficiency of ERCAS12A over one or multiple target sites. Among these, a variant with double mutations (S469K/T826F) had superior performance.

### Example 5

### Editing Efficiency of ErCas12 Variants in Human Cell Lines

[0153] The editing efficiency of another 20 ERCAS12A point mutations was evaluated. The additional 20 ERCAS12A point mutations were selected based on the E. coli screening data. Site directed mutagenesis was performed to introduce specific point mutations on the expression vector using primers listed in Table 8. Purified plasmids were lipofected into human HEK293 cells with 8 crRNAs targeting human therapeutically relevant genes (Table 9). The editing efficiency of each gene was measured by NGS 3 days post-delivery (FIG. 10A-H).

TABLE 8
Primers for Site Directed Mutagenesis of ERCAS12A

| | SEQ ID | |
|---|---|---|
| Mutation | NO | Fwd Primers (5′→3′) |
| D303C Fwd | 1582 | GCCCTACAAGTTCGAGAGCTGCGAAGAGGTGTACCAGAGCG |
| D303C Rev | 1583 | CGCTCTGGTACACCTCTTCGCAGCTCTCGAACTTGTAGGGC |
| L444W Fwd | 1584 | AAGTACAACCCAGAGATCCACTGGGTGGAAAGCGAGCTGAAG |
| L444W Rev | 1585 | CTTCAGCTCGCTTTCCACCCAGTGGATCTCTGGGTTGTACTT |
| Y513G Fwd | 1586 | CGTGACCCAGAAGCCTGGCAGCACCAAGAAGATCAAGCT |
| Y513G Rev | 1587 | AGCTTGATCTTCTTGGTGCTGCCAGGCTTCTGGGTCACG |
| S514P Fwd | 1588 | CGTGACCCAGAAGCCTTACCCCACCAAGAAGATCAAGCTGAACT |
| S514P Rev | 1589 | AGTTCAGCTTGATCTTCTTGGTGGGGTAAGGCTTCTGGGTCACG |
| K517P Fwd | 1590 | GAAGCCTTACAGCACCAAGCCCATCAAGCTGAACTTCGGC |
| K517P Rev | 1591 | GCCGAAGTTCAGCTTGATGGGCTTGGTGCTGTAAGGCTTC |
| I518P Fwd | 1592 | GCCTTACAGCACCAAGAAGCCCAAGCTGAACTTCGGCATCC |
| I518P Rev | 1593 | GGATGCCGAAGTTCAGCTTGGGCTTCTTGGTGCTGTAAGGC |
| L520M Fwd | 1594 | CTTACAGCACCAAGAAGATCAAGATGAACTTCGGCATCCCCAC |
| L520M Rev | 1595 | GTGGGGATGCCGAAGTTCATCTTGATCTTCTTGGTGCTGTAAG |
| F522A Fwd | 1596 | CACCAAGAAGATCAAGCTGAACGCCGGCATCCCCACACTGG |
| F522A Rev | 1597 | CCAGTGTGGGGATGCCGGCGTTCAGCTTGATCTTCTTGGTG |
| N556E Fwd | 1598 | CTGTACTACCTGGGCATCTTCGAGGCCAAGAACAAGCCCG |
| N556E Rev | 1599 | CGGGCTTGTTCTTGGCCTCGAAGATGCCCAGGTAGTACAG |
| E731P Fwd | 1600 | GAAGAACCTGTTCAGCGAGCCCAACCTCAAGGACATCGTGC |
| E731P Rev | 1601 | GCACGATGTCCTTGAGGTTGGGCTCGCTGAACAGGTTCTTC |
| N732T Fwd | 1602 | AACCTGTTCAGCGAGGAAACCCTCAAGGACATCGTGCTGA |
| N732T Rev | 1603 | TCAGCACGATGTCCTTGAGGGTTTCCTCGCTGAACAGGTT |
| A744N Fwd | 1604 | GAAGCTGAACGGCGAGAACGAGATTTTTTTCAGAAAGTCCAGCA |
| A744N Rev | 1605 | TGCTGGACTTTCTGAAAAAAATCTCGTTCTCGCCGTTCAGCTTC |
| K754G Fwd | 1606 | GATTTTTTTCAGAAAGTCCAGCATCGGCAACCCCATCATCCACAAAAAG |
| K754G Rev | 1607 | CTTTTTGTGGATGATGGGGTTGCCGATGCTGGACTTTCTGAAAAAAATC |
| I757W Fwd | 1608 | TCCAGCATCAAGAACCCCTGGATCCACAAAAAGGGCAGCA |
| I757W Rev | 1609 | TGCTGCCCTTTTTGTGGATCCAGGGGTTCTTGATGCTGGA |
| N787A Fwd | 1610 | CATCCAGATTGTGCGGAAGGCCATCCCCGAGAACATCTATCAAG |
| N787A Rev | 1611 | CTTGATAGATGTTCTCGGGGATGGCCTTCCGCACAATCTGGATG |
| Y832R Fwd | 1612 | CCACCAATATCGTGAAGGACCGGCGGTATACCTACGATAAGTACTTCC |
| Y832R Rev | 1613 | GGAAGTACTTATCGTAGGTATACCGCCGGTCCTTCACGATATTGGTGG |
| Y836K Fwd | 1614 | GTGAAGGACTACCGGTATACCAAGGATAAGTACTTCCTGCACATGCC |
| Y836K Rev | 1615 | GGCATGTGCAGGAAGTACTTATCCTTGGTATACCGGTAGTCCTTCAC |
| Y839L Fwd | 1616 | GACTACCGGTATACCTACGATAAGCTGTTCCTGCACATGCCCA |
| Y839L Rev | 1617 | TGGGCATGTGCAGGAACAGCTTATCGTAGGTATACCGGTAGTC |
| Y907I Fwd | 1618 | GCTTCAACATCGTGAATGGCATCGACTACCAGATCAAACTGAAGCA |
| Y907I Rev | 1619 | TGCTTCAGTTTGATCTGGTAGTCGATGCCATTCACGATGTTGAAGC |
| K974G Fwd | 1620 | CTTCAAGAAAGGCCGCTTCGGCGTGGAAAGACAGGTCTACCAG |
| K974G Rev | 1621 | CTGGTAGACCTGTCTTTCCACGCCGAAGCGGCCTTTCTTGAAG |
| D303C Fwd | 1582 | GCCCTACAAGTTCGAGAGCTGCGAAGAGGTGTACCAGAGCG |
| D303C Rev | 1583 | CGCTCTGGTACACCTCTTCGCAGCTCTCGAACTTGTAGGGC |
| L444W Fwd | 1584 | AAGTACAACCCAGAGATCCACTGGGTGGAAAGCGAGCTGAAG |
| L444W Rev | 1585 | CTTCAGCTCGCTTTCCACCCAGTGGATCTCTGGGTTGTACTT |
| Y513G Fwd | 1586 | CGTGACCCAGAAGCCTGGCAGCACCAAGAAGATCAAGCT |
| Y513G Rev | 1587 | AGCTTGATCTTCTTGGTGCTGCCAGGCTTCTGGGTCACG |
| S514P Fwd | 1588 | CGTGACCCAGAAGCCTTACCCCACCAAGAAGATCAAGCTGAACT |
| S514P Rev | 1589 | AGTTCAGCTTGATCTTCTTGGTGGGGTAAGGCTTCTGGGTCACG |
| K517P Fwd | 1590 | GAAGCCTTACAGCACCAAGCCCATCAAGCTGAACTTCGGC |
| K517P Rev | 1591 | GCCGAAGTTCAGCTTGATGGGCTTGGTGCTGTAAGGCTTC |
| I518P Fwd | 1592 | GCCTTACAGCACCAAGAAGCCCAAGCTGAACTTCGGCATCC |
| I518P Rev | 1593 | GGATGCCGAAGTTCAGCTTGGGCTTCTTGGTGCTGTAAGGC |
| L520M Fwd | 1594 | CTTACAGCACCAAGAAGATCAAGATGAACTTCGGCATCCCCAC |
| L520M Rev | 1595 | GTGGGGATGCCGAAGTTCATCTTGATCTTCTTGGTGCTGTAAG |
| F522A Fwd | 1596 | CACCAAGAAGATCAAGCTGAACGCCGGCATCCCCACACTGG |
| F522A Rev | 1597 | CCAGTGTGGGGATGCCGGCGTTCAGCTTGATCTTCTTGGTG |
| N556E Fwd | 1598 | CTGTACTACCTGGGCATCTTCGAGGCCAAGAACAAGCCCG |
| N556E Rev | 1599 | CGGGCTTGTTCTTGGCCTCGAAGATGCCCAGGTAGTACAG |
| E731P Fwd | 1600 | GAAGAACCTGTTCAGCGAGCCCAACCTCAAGGACATCGTGC |
| E731P Rev | 1601 | GCACGATGTCCTTGAGGTTGGGCTCGCTGAACAGGTTCTTC |
| N732T Fwd | 1602 | AACCTGTTCAGCGAGGAAACCCTCAAGGACATCGTGCTGA |
| N732T Rev | 1603 | TCAGCACGATGTCCTTGAGGGTTTCCTCGCTGAACAGGTT |
| A744N Fwd | 1604 | GAAGCTGAACGGCGAGAACGAGATTTTTTTCAGAAAGTCCAGCA |
| A744N Rev | 1605 | TGCTGGACTTTCTGAAAAAAATCTCGTTCTCGCCGTTCAGCTTC |
| K754G Fwd | 1606 | GATTTTTTTCAGAAAGTCCAGCATCGGCAACCCCATCATCCACAAAAAG |
| K754G Rev | 1607 | CTTTTTGTGGATGATGGGGTTGCCGATGCTGGACTTTCTGAAAAAAATC |
| I757W Fwd | 1608 | TCCAGCATCAAGAACCCCTGGATCCACAAAAAGGGCAGCA |
| I757W Rev | 1609 | TGCTGCCCTTTTTGTGGATCCAGGGGTTCTTGATGCTGGA |
| N787A Fwd | 1610 | CATCCAGATTGTGCGGAAGGCCATCCCCGAGAACATCTATCAAG |
| N787A Rev | 1611 | CTTGATAGATGTTCTCGGGGATGGCCTTCCGCACAATCTGGATG |
| Y832R Fwd | 1612 | CCACCAATATCGTGAAGGACCGGCGGTATACCTACGATAAGTACTTCC |
| Y832R Rev | 1613 | GGAAGTACTTATCGTAGGTATACCGCCGGTCCTTCACGATATTGGTGG |
| Y836K Fwd | 1614 | GTGAAGGACTACCGGTATACCAAGGATAAGTACTTCCTGCACATGCC |
| Y836K Rev | 1615 | GGCATGTGCAGGAAGTACTTATCCTTGGTATACCGGTAGTCCTTCAC |
| Y839L Fwd | 1616 | GACTACCGGTATACCTACGATAAGCTGTTCCTGCACATGCCCA |
| Y839L Rev | 1617 | TGGGCATGTGCAGGAACAGCTTATCGTAGGTATACCGGTAGTC |
| Y907I Fwd | 1618 | GCTTCAACATCGTGAATGGCATCGACTACCAGATCAAACTGAAGCA |
| Y907I Rev | 1619 | TGCTTCAGTTTGATCTGGTAGTCGATGCCATTCACGATGTTGAAGC |
| K974G Fwd | 1620 | CTTCAAGAAAGGCCGCTTCGGCGTGGAAAGACAGGTCTACCAG |
| K974G Rev | 1621 | CTGGTAGACCTGTCTTTCCACGCCGAAGCGGCCTTTCTTGAAG |

TABLE 9
crRNA for Editing Experiments and NGS Primer Sequences

| | SEQ ID | |
|---|---|---|
| Target | NO | crRNA RNA Sequences (5′→3′) |
| AAVS1 | 1622 | UUUUUAAUUUCUACUCUUGUAGAUGACCCCUAAGGGAAGAAUGAG |
| PD1 | 1623 | UUUUUAAUUUCUACUCUUGUAGAUGCACGAAGCUCUCCGAUGUGU |
| TGFBR2 | 1624 | UUUUUAAUUUCUACUCUUGUAGAUUGAUGUGAGAUUUUCCACCUG |
| TRAC1 | 1625 | UUUUUAAUUUCUACUCUUGUAGAUCAGAUACGAACCUAAACUUUC |
| B2M-12 | 1626 | UUUUUAAUUUCUACUCUUGUAGAUUCACAGCCCAAGAUAGUUAAG |
| CIITA | 1627 | UUUUUAAUUUCUACUCUUGUAGAUCCGGCCUUUUUACCUUGGGGC |
| CISH | 1628 | UUUUUAAUUUCUACUCUUGUAGAUACUGACAGCGUGAACAGGUAG |
| TRAC2 | 1629 | UUUUUAAUUUCUACUCUUGUAGAUGAGUCUCUCAGCUGGUACACG |
| | SEQ ID | |
| Primer | NO | NGS DNA Primers (5′→3′) |
| AAVS1 Fwd | 1630 | acactctttccctacacgacgctcttccgatctGCTGTCACACTCCAGTT |
| AAVS1 Rev | 1631 | gtgactggagttcagacgtgtgctcttccgatctACCCAGTGTCCACAAG |
| PD1 Fwd | 1632 | acactctttccctacacgacgctcttccgatctAGCTTGTCCGTCTGGTT |
| PD1 Rev | 1633 | gtgactggagttcagacgtgtgctcttccgatctAGACTCCCCAGACAGG |
| TGFBR2 Fwd | 1634 | acactctttccctacacgacgctcttccgatctCATGATAGTCACTGACAACAAC |
| | | G |
| TGFBR2 Rev | 1635 | gtgactggagttcagacgtgtgctcttccgatctCTTACCATACAGCCACACAGA |
| TRAC1 Fwd | 1636 | acactctttccctacacgacgctcttccgatctACATGCAAGCCCATAACC |
| TRAC1 Rev | 1637 | gtgactggagttcagacgtgtgctcttccgatctGGTTTGCTCTCAGAGCTTA |
| B2M-12 Fwd | 1638 | acactctttccctacacgacgctcttccgatctCATCCGACATTGAAGTTGACTT |
| | | A |
| B2M-12 Rev | 1639 | gtgactggagttcagacgtgtgctcttccgatctCTACTCATACACAACTTTCAG |
| | | CA |
| CIITA Fwd | 1640 | acactctttccctacacgacgctcttccgatctTGGGATTCCTACACAATGC |
| CIITA Rev | 1641 | gtgactggagttcagacgtgtgctcttccgatctCCCATCCCCAATTCAGAATG |
| CISH Fwd | 1642 | acactctttccctacacgacgctcttccgatctCACAAGGCTGACCACATC |
| CISH Rev | 1643 | gtgactggagttcagacgtgtgctcttccgatctCAGAAGGCACGTTCTTAGT |
| TRAC2 Fwd | 1644 | acactctttccctacacgacgctcttccgatctATCCTCTTGTCCCACAGATATC |
| TRAC2 Rev | 1645 | gtgactggagttcagacgtgtgctcttccgatctCCATAGACCTCATGTCTAGCA |

### Example 6

### Editing Efficiency of ERCAS12A Variants in Human Cells

[0154] Evaluation of the editing efficiency of the ERCAS12A Y513G point mutation that was selected from plasmid screening was performed. Site directed mutagenesis was performed to introduce the point mutation on the protein expression vector using primers listed in Table 10. Purified protein was tested as RNP in human HEK293 cells with 7 crRNAs targeting human therapeutically relevant genes (Table 11). The editing efficiency of each gene was measured by NGS 2 days post-delivery (FIG. 11).

[0155] Site directed mutagenesis was then used to add additional mutations to ERCAS12A Y513G, Y832R, and F840L, and to make S514P, on the protein expression vector using primers listed in Table 10. Purified protein was tested as RNP in human HEK293 cells with 4 crRNAs targeting human therapeutically relevant genes (Table 11). The editing efficiency of each gene was measured by NGS 2 days post-delivery (FIG. 12A-D). This experiment also included Acidaminococcus sp. Cas12a M537R/F870L (AsCas12a-Ultra) as a positive control, and with and without electroporation enhancer.

TABLE 10
Primers for Site Directed Mutagenesis of ERCAS12A

| | SEQ ID | |
|---|---|---|
| Primer | NO | DNA Primers (5′→3′) |
| Y513G Fwd | 1646 | ACGTCACTCAGAAGCCGGGCTCAACTAAAAAGATCAAGTTAAATTTTGGAATT |
| Y513G Rev | 1647 | AATTCCAAAATTTAACTTGATCTTTTTAGTTGAGCCCGGCTTCTGAGTGACGT |
| S514P Fwd | 1648 | CGTCACTCAGAAGCCGTACCCGACTAAAAAGATCAAGTTAAATTTTGGAATTCC |
| S514P Rev | 1649 | GGAATTCCAAAATTTAACTTGATCTTTTTAGTCGGGTACGGCTTCTGAGTGACG |
| Y832R Fwd | 1650 | CAGCAACAAACATTGTGAAAGACCGTCGCTACACTTACGATAAGTACTTTTTAC |
| Y832R Rev | 1651 | GTAAAAAGTACTTATCGTAAGTGTAGCGACGGTCTTTCACAATGTTTGTTGCTG |
| F840L Fwd | 1652 | ACTATCGCTACACTTACGATAAGTACCTGTTACATATGCCTATTACGATTAACT |
| | | TTAAGG |
| F840L Rev | 1653 | CCTTAAAGTTAATCGTAATAGGCATATGTAACAGGTACTTATCGTAAGTGTAGC |
| | | GATAGT |

TABLE 11
crRNA for Editing Experiments and NGS Primer Sequences

| | SEQ ID | |
|---|---|---|
| Target | NO | crRNA RNA Sequences (5′→3′) |
| AAVS1 | 1622 | UUUUUAAUUUCUACUCUUGUAGAUGACCCCUAAGGGAAGAAUGAG |
| PD1 | 1623 | UUUUUAAUUUCUACUCUUGUAGAUGCACGAAGCUCUCCGAUGUGU |
| TGFBR2 | 1624 | UUUUUAAUUUCUACUCUUGUAGAUUGAUGUGAGAUUUUCCACCUG |
| TRAC1 | 1625 | UUUUUAAUUUCUACUCUUGUAGAUCAGAUACGAACCUAAACUUUC |
| B2M-12 | 1626 | UUUUUAAUUUCUACUCUUGUAGAUUCACAGCCCAAGAUAGUUAAG |
| CIITA | 1627 | UUUUUAAUUUCUACUCUUGUAGAUCCGGCCUUUUUACCUUGGGGC |
| CISH | 1628 | UUUUUAAUUUCUACUCUUGUAGAUACUGACAGCGUGAACAGGUAG |
| TRAC2 | 1629 | UUUUUAAUUUCUACUCUUGUAGAUGAGUCUCUCAGCUGGUACACG |
| | SEQ ID | |
| Primer | NO | NGS DNA Primers (5′→3′) |
| AAVS1 Fwd | 1630 | acactctttccctacacgacgctcttccgatctGCTGTCACACTCCAGTT |
| AAVS1 Rev | 1631 | gtgactggagttcagacgtgtgctcttccgatctACCCAGTGTCCACAAG |
| PD1 Fwd | 1632 | acactctttccctacacgacgctcttccgatctAGCTTGTCCGTCTGGTT |
| PD1 Rev | 1633 | gtgactggagttcagacgtgtgctcttccgatctAGACTCCCCAGACAGG |
| TGFBR2 Fwd | 1634 | acactctttccctacacgacgctcttccgatctCATGATAGTCACTGACAACAAC |
| | | G |
| TGFBR2 Rev | 1635 | gtgactggagttcagacgtgtgctcttccgatctCTTACCATACAGCCACACAGA |
| TRAC1 Fwd | 1636 | acactctttccctacacgacgctcttccgatctACATGCAAGCCCATAACC |
| TRAC1 Rev | 1637 | gtgactggagttcagacgtgtgctcttccgatctGGTTTGCTCTCAGAGCTTA |
| B2M-12 Fwd | 1638 | acactctttccctacacgacgctcttccgatctCATCCGACATTGAAGTTGACTT |
| | | A |
| B2M-12 Rev | 1639 | gtgactggagttcagacgtgtgctcttccgatctCTACTCATACACAACTTTCAG |
| | | CA |
| CIITA Fwd | 1640 | acactctttccctacacgacgctcttccgatctTGGGATTCCTACACAATGC |
| CIITA Rev | 1641 | gtgactggagttcagacgtgtgctcttccgatctCCCATCCCCAATTCAGAATG |
| CISH Fwd | 1642 | acactctttccctacacgacgctcttccgatctCACAAGGCTGACCACATC |
| CISH Rev | 1643 | gtgactggagttcagacgtgtgctcttccgatctCAGAAGGCACGTTCTTAGT |
| TRAC2 Fwd | 1644 | acactctttccctacacgacgctcttccgatctATCCTCTTGTCCCACAGATATC |
| TRAC2 Rev | 1645 | gtgactggagttcagacgtgtgctcttccgatctCCATAGACCTCATGTCTAGCA |

### Example 7

[0156] Another mutation, K516P, was stacked with the best ERCAS12A stacked mutants identified in previous examples (e.g., D303R/S469K/K516P/T826F/F840L). Site directed mutagenesis was used to add this point mutation and the primers are listed in Table 12. The protein was expressed in E. coli BL21 DE3 cells, sequentially purified using nickel-affinity, heparin chromatography and hydroxy-apatite chromatography. To evaluate the genome editing efficiency of each variant, ERCAS12A mutant-RNPs were assembled using crRNAs found in Table 13. The assembled RNPs (2 μM) were delivered into HEK293 cells by nucleofection, and the percent indels was measured by NGS 48-hours post-delivery (FIG. 13). Each of the stacked mutants (D303R/S469K/T826F/F840L; F465R/S469K/T826F/F840L; D303R/S469K/K516P/T826F/F840L) improved activity over ERCAS12A WT at these sites. Stacking these beneficial mutations led to more potent variants of ERCAS12A than any individual point mutations.

TABLE 12
Primers for Site Directed Mutagenesis of ERCAS12A

| | SEQ ID | |
|---|---|---|
| Primer | NO | DNA Primers (5′→3′) |
| K516P Fwd | 1654 | CTCAGAAGCCGTACTCAACTCCGAAGATCAAGTTAAATTTTGGAATTCCGA |
| K516P Rev | 1655 | TCGGAATTCCAAAATTTAACTTGATCTTCGGAGTTGAGTACGGCTTCTGAG |

TABLE 13
crRNA for Editing Experiments and NGS Primer Sequences

| | SEQ ID | |
|---|---|---|
| Name | NO | crRNA RNA Sequences (5′→3′) |
| crRNA-1 | 1656 | UUAAUUUCUACUCUUGUAGAUGACCCCUAAGGGAAGAAUGA |
| crRNA-2 | 1657 | UUAAUUUCUACUCUUGUAGAUCCGAUAUUCCUCAGGUACUC |
| crRNA-3 | 1658 | UUAAUUUCUACUCUUGUAGAUACUUUCCAUUCUCUGCUGGA |
| crRNA-4 | 1659 | UUAAUUUCUACUCUUGUAGAUCUGAAUUGCUAUGUGUCUGG |
| crRNA-5 | 1660 | UUAAUUUCUACUCUUGUAGAUAUCCAUCCGACAUUGAAGUU |
| crRNA-6 | 1661 | UUAAUUUCUACUCUUGUAGAUUCACAGCCCAAGAUAGUUAA |
| crRNA-7 | 1662 | UUAAUUUCUACUCUUGUAGAUCCGGCCUUUUUACCUUGGGG |
| crRNA-8 | 1663 | UUAAUUUCUACUCUUGUAGAUACUGACAGCGUGAACAGGUA |
| crRNA-9 | 1664 | UUAAUUUCUACUCUUGUAGAUGCACGAAGCUCUCCGAUGUG |
| crRNA-10 | 1665 | UUAAUUUCUACUCUUGUAGAUUGAUGUGAGAUUUUCCACCU |
| crRNA-11 | 1666 | UUAAUUUCUACUCUUGUAGAUCAGAUACGAACCUAAACUUU |
| crRNA-12 | 1667 | UUAAUUUCUACUCUUGUAGAUGAGUCUCUCAGCUGGUACAC |

[0157] The nucleotide and polypeptide sequences of selected ERCAS12A variants are provided in Table 14.

TABLE 14
Polynucleotide and Polypeptide Sequences of ERCAS12A Variants

ErCas12a-Q18V-NT (SEQ ID NO: 3)
atgAATAACGGTACCAATAACTTTCAAAATTTTATCGGGATCTCCTCGTTGGTGAAAACTCTTCGTAATGCTTTAATCCCGACT
GAGACAACACAGCAGTTCATCGTTAAAAACGGCATCATTAAAGAAGATGAGCTGCGCGGCGAGAACCGTCAGATTTTAAAGGAC
ATCATGGACGACTATTACCGTGGGTTCATCTCAGAAACATTAAGCAGCATCGATGATATCGACTGGACCTCACTGTTTGAGAAG
ATGGAGATTCAACTTAAGAATGGAGACAACAAAGACACTTTAATTAAGGAGCAGACGGAATATCGTAAAGCTATCCATAAAAAA
TTTGCAAACGATGACCGTTTCAAAAATATGTTTTCCGCAAAATTGATTAGCGACATTTTACCTGAATTCGTAATCCATAACAAC
AACTATTCCGCATCTGAAAAAGAGGAGAAGACCCAAGTTATCAAACTTTTTTCACGTTTCGCGACATCTTTTAAAGACTACTTT
AAGAATCGTGCGAATTGTTTCAGTGCAGATGATATTTCGTCTAGTTCATGTCACCGTATCGTGAATGACAACGCTGAGATTTTC
TTTTCTAATGCGTTGGTGTATCGCCGCATCGTAAAGTCCTTGTCGAATGATGATATCAACAAAATTAGTGGTGACATGAAAGAC
TCCCTGAAAGAAATGTCATTAGAGGAGATTTACAGCTACGAAAAATACGGAGAGTTCATCACTCAGGAAGGTATCTCCTTTTAC
AACGATATTTGCGGCAAAGTTAATAGTTTCATGAATCTGTATTGTCAGAAGAATAAGGAAAACAAGAATCTGTACAAGTTACAA
AAGCTTCATAAACAGATCTTGTGCATCGCCGACACGTCTTATGAAGTCCCGTATAAATTTGAAAGCGACGAAGAAGTATATCAG
AGTGTGAATGGATTCTTGGACAATATCTCATCAAAACACATTGTTGAACGTTTGCGCAAAATCGGCGACAACTATAACGGATAC
AACTTGGATAAAATTTATATCGTATCAAAATTTTATGAATCAGTATCCCAAAAGACTTACCGTGATTGGGAGACTATTAATACG
GCGTTAGAAATCCATTACAACAACATTCTGCCGGGTAACGGTAAATCGAAAGCGGACAAAGTGAAGAAGGCGGTTAAGAACGAT
CTTCAGAAGTCTATCACGGAGATTAATGAGCTGGTTTCCAATTACAAGTTGTGCTCGGATGATAACATCAAAGCTGAAACCTAT
ATCCATGAAATTTCTCATATTCTTAATAACTTCGAGGCACAAGAATTAAAATATAACCCAGAAATTCATCTGGTTGAGAGCGAA
CTTAAAGCTTCAGAATTAAAAAATGTTTTGGACGTAATTATGAACGCCTTCCATTGGTGCAGCGTGTTTATGACAGAGGAGTTA
GTAGATAAGGATAACAACTTTTATGCAGAATTGGAAGAGATCTATGATGAGATCTATCCAGTGATTTCACTGTATAACTTAGTC
CGTAATTACGTCACTCAGAAGCCGTACTCAACTAAAAAGATCAAGTTAAATTTTGGAATTCCGACATTGGCGGATGGTTGGAGT
AAGTCTAAGGAATACTCAAATAACGCTATTATCTTAATGCGTGACAACCTGTATTACTTGGGTATTTTCAATGCCAAAAATAAG
CCCGATAAAAAAATCATTGAAGGGAATACTTCAGAAAATAAGGGAGATTACAAAAAAATGATTTATAACCTTTTGCCAGGCCCA
AACAAAATGATCCCCAAGGTGTTTTTGAGTAGTAAGACGGGAGTAGAAACATATAAGCCATCAGCGTACATTCTTGAAGGGTAC
AAACAAAATAAACACATCAAGAGCAGCAAGGACTTTGACATTACATTTTGTCATGACTTAATCGACTACTTTAAAAATTGCATT
GCCATTCACCCTGAGTGGAAAAATTTTGGTTTCGACTTCAGTGATACCTCTACCTATGAAGATATCTCTGGTTTTTATCGTGAG
GTAGAACTTCAGGGTTACAAGATCGATTGGACGTACATTTCCGAGAAAGACATTGATCTTTTACAAGAGAAGGGTCAGCTTTAC
TTATTTCAGATCTACAATAAAGACTTTTCGAAAAAATCCACGGGCAACGACAACCTTCATACAATGTACTTAAAGAACCTGTTC
TCTGAAGAAAACTTGAAAGATATCGTGCTTAAATTGAATGGCGAGGCCGAGATTTTTTTCCGTAAAAGCTCGATTAAGAATCCC
ATCATCCACAAGAAAGGCAGCATTCTGGTAAATCGTACCTATGAAGCGGAGGAAAAGGACCAATTTGGTAATATTCAGATTGTC
CGTAAGAACATCCCTGAAAATATCTATCAAGAATTATATAAATATTTCAACGATAAGTCGGACAAGGAACTTAGCGATGAAGCC
GCGAAGTTGAAAAATGTTGTTGGTCACCACGAAGCAGCAACAAACATTGTGAAAGACTATCGCTACACTTACGATAAGTACTTT
TTACATATGCCTATTACGATTAACTTTAAGGCAAATAAGACAGGTTTTATCAACGACCGTATCCTGCAATATATTGCAAAAGAG
AAGGACCTGCATGTCATTGGGATTGATCGCGGTGAACGCAATCTGATTTACGTGAGTGTTATTGATACCTGCGGTAATATTGTT
GAGCAAAAGTCTTTTAATATCGTTAATGGTTACGACTACCAAATTAAGCTTAAACAACAGGAAGGTGCCCGCCAGATCGCCCGT
AAGGAGTGGAAGGAAATCGGAAAAATTAAGGAAATCAAAGAGGGATATCTGAGCTTGGTTATTCATGAAATCTCAAAGATGGTT
ATTAAGTACAACGCCATCATCGCTATGGAAGACTTATCGTATGGGTTTAAAAAGGGTCGTTTCAAAGTTGAGCGCCAGGTCTAC
CAAAAGTTTGAAACGATGCTTATTAATAAATTAAACTACTTGGTTTTCAAAGATATCTCTATTACCGAGAATGGAGGTTTACTG
AAAGGATACCAGTTAACGTATATCCCCGATAAGCTTAAAAACGTGGGCCATCAGTGTGGCTGTATTTTCTATGTGCCCGCGGCA
TATACATCAAAAATTGACCCGACGACGGGTTTCGTTAATATCTTCAAGTTCAAAGATCTGACAGTTGATGCAAAACGCGAATTC
ATTAAGAAGTTCGATAGTATTCGCTATGACTCCGAGAAAAATTTGTTTTGCTTCACTTTTGACTACAATAACTTTATTACTCAG
AATACAGTCATGAGTAAAAGCTCCTGGTCGGTTTACACGTACGGGGTACGCATCAAACGTCGTTTTGTGAATGGTCGTTTTAGT
AATGAGTCGGATACAATTGATATTACCAAGGATATGGAGAAGACTCTGGAAATGACAGACATCAATTGGCGTGATGGACATGAT
TTGCGTCAGGACATTATCGACTATGAGATTGTGCAGCATATTTTCGAAATTTTTCGCCTGACGGTGCAAATGCGTAATTCCTTA
AGCGAACTGGAAGATCGCGACTATGACCGCTTAATTTCTCCTGTGCTGAATGAGAACAACATCTTCTATGACTCAGCGAAAGCC
GGGGACGCTTTGCCAAAGGATGCAGATGCTAACGGTGCATATTGTATTGCTCTGAAAGGCCTTTACGAGATCAAACAAATTACT
GAAAACTGGAAGGAAGATGGAAAGTTTTCCCGTGATAAATTGAAGATCTCTAATAAGGACTGGTTTGACTTTATCCAAAATAAA
CGTTATTTA
ErCas12a-Q18V-AA (SEQ ID NO: 4)
MNNGTNNFQNFIGISSLVKTLRNALIPTETTQQFIVKNGIIKEDELRGENRQILKDIMDDYYRGFISETLSSIDDIDWTSLFEK
MEIQLKNGDNKDTLIKEQTEYRKAIHKKFANDDRFKNMFSAKLISDILPEFVIHNNNYSASEKEEKTQVIKLESRFATSFKDYF
KNRANCFSADDISSSSCHRIVNDNAEIFFSNALVYRRIVKSLSNDDINKISGDMKDSLKEMSLEEIYSYEKYGEFITQEGISFY
NDICGKVNSFMNLYCQKNKENKNLYKLQKLHKQILCIADTSYEVPYKFESDEEVYQSVNGELDNISSKHIVERLRKIGDNYNGY
NLDKIYIVSKFYESVSQKTYRDWETINTALEIHYNNILPGNGKSKADKVKKAVKNDLQKSITEINELVSNYKLCSDDNIKAETY
IHEISHILNNFEAQELKYNPEIHLVESELKASELKNVLDVIMNAFHWCSVFMTEELVDKDNNFYAELEEIYDEIYPVISLYNLV
RNYVTQKPYSTKKIKLNFGIPTLADGWSKSKEYSNNAIILMRDNLYYLGIFNAKNKPDKKIIEGNTSENKGDYKKMIYNLLPGP
NKMIPKVFLSSKTGVETYKPSAYILEGYKQNKHIKSSKDFDITFCHDLIDYFKNCIAIHPEWKNFGFDFSDTSTYEDISGFYRE
VELQGYKIDWTYISEKDIDLLQEKGQLYLFQIYNKDFSKKSTGNDNLHTMYLKNLFSEENLKDIVLKLNGEAEIFFRKSSIKNP
IIHKKGSILVNRTYEAEEKDQFGNIQIVRKNIPENIYQELYKYFNDKSDKELSDEAAKLKNVVGHHEAATNIVKDYRYTYDKYF
LHMPITINFKANKTGFINDRILQYIAKEKDLHVIGIDRGERNLIYVSVIDTCGNIVEQKSFNIVNGYDYQIKLKQQEGARQIAR
KEWKEIGKIKEIKEGYLSLVIHEISKMVIKYNAIIAMEDLSYGFKKGRFKVERQVYQKFETMLINKLNYLVFKDISITENGGLL
KGYQLTYIPDKLKNVGHQCGCIFYVPAAYTSKIDPTTGFVNIFKFKDLTVDAKREFIKKFDSIRYDSEKNLFCFTEDYNNFITQ
NTVMSKSSWSVYTYGVRIKRRFVNGRFSNESDTIDITKDMEKTLEMTDINWRDGHDLRQDIIDYEIVQHIFEIFRLTVQMRNSL
SELEDRDYDRLISPVLNENNIFYDSAKAGDALPKDADANGAYCIALKGLYEIKQITENWKEDGKFSRDKLKISNKDWFDFIQNK
RYL
ErCas12a-I35L-NT (SEQ ID NO: 5)
atgAATAACGGTACCAATAACTTTCAAAATTTTATCGGGATCTCCTCGTTGCAAAAAACTCTTCGTAATGCTTTAATCCCGACT
GAGACAACACAGCAGTTCCTGGTTAAAAACGGCATCATTAAAGAAGATGAGCTGCGCGGCGAGAACCGTCAGATTTTAAAGGAC
ATCATGGACGACTATTACCGTGGGTTCATCTCAGAAACATTAAGCAGCATCGATGATATCGACTGGACCTCACTGTTTGAGAAG
ATGGAGATTCAACTTAAGAATGGAGACAACAAAGACACTTTAATTAAGGAGCAGACGGAATATCGTAAAGCTATCCATAAAAAA
TTTGCAAACGATGACCGTTTCAAAAATATGTTTTCCGCAAAATTGATTAGCGACATTTTACCTGAATTCGTAATCCATAACAAC
AACTATTCCGCATCTGAAAAAGAGGAGAAGACCCAAGTTATCAAACTTTTTTCACGTTTCGCGACATCTTTTAAAGACTACTTT
AAGAATCGTGCGAATTGTTTCAGTGCAGATGATATTTCGTCTAGTTCATGTCACCGTATCGTGAATGACAACGCTGAGATTTTC
TTTTCTAATGCGTTGGTGTATCGCCGCATCGTAAAGTCCTTGTCGAATGATGATATCAACAAAATTAGTGGTGACATGAAAGAC
TCCCTGAAAGAAATGTCATTAGAGGAGATTTACAGCTACGAAAAATACGGAGAGTTCATCACTCAGGAAGGTATCTCCTTTTAC
AACGATATTTGCGGCAAAGTTAATAGTTTCATGAATCTGTATTGTCAGAAGAATAAGGAAAACAAGAATCTGTACAAGTTACAA
AAGCTTCATAAACAGATCTTGTGCATCGCCGACACGTCTTATGAAGTCCCGTATAAATTTGAAAGCGACGAAGAAGTATATCAG
AGTGTGAATGGATTCTTGGACAATATCTCATCAAAACACATTGTTGAACGTTTGCGCAAAATCGGCGACAACTATAACGGATAC
AACTTGGATAAAATTTATATCGTATCAAAATTTTATGAATCAGTATCCCAAAAGACTTACCGTGATTGGGAGACTATTAATACG
GCGTTAGAAATCCATTACAACAACATTCTGCCGGGTAACGGTAAATCGAAAGCGGACAAAGTGAAGAAGGCGGTTAAGAACGAT
CTTCAGAAGTCTATCACGGAGATTAATGAGCTGGTTTCCAATTACAAGTTGTGCTCGGATGATAACATCAAAGCTGAAACCTAT
ATCCATGAAATTTCTCATATTCTTAATAACTTCGAGGCACAAGAATTAAAATATAACCCAGAAATTCATCTGGTTGAGAGCGAA
CTTAAAGCTTCAGAATTAAAAAATGTTTTGGACGTAATTATGAACGCCTTCCATTGGTGCAGCGTGTTTATGACAGAGGAGTTA
GTAGATAAGGATAACAACTTTTATGCAGAATTGGAAGAGATCTATGATGAGATCTATCCAGTGATTTCACTGTATAACTTAGTC
CGTAATTACGTCACTCAGAAGCCGTACTCAACTAAAAAGATCAAGTTAAATTTTGGAATTCCGACATTGGCGGATGGTTGGAGT
AAGTCTAAGGAATACTCAAATAACGCTATTATCTTAATGCGTGACAACCTGTATTACTTGGGTATTTTCAATGCCAAAAATAAG
CCCGATAAAAAAATCATTGAAGGGAATACTTCAGAAAATAAGGGAGATTACAAAAAAATGATTTATAACCTTTTGCCAGGCCCA
AACAAAATGATCCCCAAGGTGTTTTTGAGTAGTAAGACGGGAGTAGAAACATATAAGCCATCAGCGTACATTCTTGAAGGGTAC
AAACAAAATAAACACATCAAGAGCAGCAAGGACTTTGACATTACATTTTGTCATGACTTAATCGACTACTTTAAAAATTGCATT
GCCATTCACCCTGAGTGGAAAAATTTTGGTTTCGACTTCAGTGATACCTCTACCTATGAAGATATCTCTGGTTTTTATCGTGAG
GTAGAACTTCAGGGTTACAAGATCGATTGGACGTACATTTCCGAGAAAGACATTGATCTTTTACAAGAGAAGGGTCAGCTTTAC
TTATTTCAGATCTACAATAAAGACTTTTCGAAAAAATCCACGGGCAACGACAACCTTCATACAATGTACTTAAAGAACCTGTTC
TCTGAAGAAAACTTGAAAGATATCGTGCTTAAATTGAATGGCGAGGCCGAGATTTTTTTCCGTAAAAGCTCGATTAAGAATCCC
ATCATCCACAAGAAAGGCAGCATTCTGGTAAATCGTACCTATGAAGCGGAGGAAAAGGACCAATTTGGTAATATTCAGATTGTC
CGTAAGAACATCCCTGAAAATATCTATCAAGAATTATATAAATATTTCAACGATAAGTCGGACAAGGAACTTAGCGATGAAGCC
GCGAAGTTGAAAAATGTTGTTGGTCACCACGAAGCAGCAACAAACATTGTGAAAGACTATCGCTACACTTACGATAAGTACTTT
TTACATATGCCTATTACGATTAACTTTAAGGCAAATAAGACAGGTTTTATCAACGACCGTATCCTGCAATATATTGCAAAAGAG
AAGGACCTGCATGTCATTGGGATTGATCGCGGTGAACGCAATCTGATTTACGTGAGTGTTATTGATACCTGCGGTAATATTGTT
GAGCAAAAGTCTTTTAATATCGTTAATGGTTACGACTACCAAATTAAGCTTAAACAACAGGAAGGTGCCCGCCAGATCGCCCGT
AAGGAGTGGAAGGAAATCGGAAAAATTAAGGAAATCAAAGAGGGATATCTGAGCTTGGTTATTCATGAAATCTCAAAGATGGTT
ATTAAGTACAACGCCATCATCGCTATGGAAGACTTATCGTATGGGTTTAAAAAGGGTCGTTTCAAAGTTGAGCGCCAGGTCTAC
CAAAAGTTTGAAACGATGCTTATTAATAAATTAAACTACTTGGTTTTCAAAGATATCTCTATTACCGAGAATGGAGGTTTACTG
AAAGGATACCAGTTAACGTATATCCCCGATAAGCTTAAAAACGTGGGCCATCAGTGTGGCTGTATTTTCTATGTGCCCGCGGCA
TATACATCAAAAATTGACCCGACGACGGGTTTCGTTAATATCTTCAAGTTCAAAGATCTGACAGTTGATGCAAAACGCGAATTC
ATTAAGAAGTTCGATAGTATTCGCTATGACTCCGAGAAAAATTTGTTTTGCTTCACTTTTGACTACAATAACTTTATTACTCAG
AATACAGTCATGAGTAAAAGCTCCTGGTCGGTTTACACGTACGGGGTACGCATCAAACGTCGTTTTGTGAATGGTCGTTTTAGT
AATGAGTCGGATACAATTGATATTACCAAGGATATGGAGAAGACTCTGGAAATGACAGACATCAATTGGCGTGATGGACATGAT
TTGCGTCAGGACATTATCGACTATGAGATTGTGCAGCATATTTTCGAAATTTTTCGCCTGACGGTGCAAATGCGTAATTCCTTA
AGCGAACTGGAAGATCGCGACTATGACCGCTTAATTTCTCCTGTGCTGAATGAGAACAACATCTTCTATGACTCAGCGAAAGCC
GGGGACGCTTTGCCAAAGGATGCAGATGCTAACGGTGCATATTGTATTGCTCTGAAAGGCCTTTACGAGATCAAACAAATTACT
GAAAACTGGAAGGAAGATGGAAAGTTTTCCCGTGATAAATTGAAGATCTCTAATAAGGACTGGTTTGACTTTATCCAAAATAAA
CGTTATTTA
ErCas12a-I35L-AA (SEQ ID NO: 6)
MNNGTNNFQNFIGISSLQKTLRNALIPTETTQQFIVKNGIIKEDELRGENRQILKDIMDDYYRGFISETLSSIDDIDWTSLFEK
MEIQLKNGDNKDTLIKEQTEYRKAIHKKFANDDRFKNMFSAKLISDILPEFVIHNNNYSASEKEEKTQVIKLESRFATSFKDYF
KNRANCFSADDISSSSCHRIVNDNAEIFFSNALVYRRIVKSLSNDDINKISGDMKDSLKEMSLEEIYSYEKYGEFITQEGISFY
NDICGKVNSFMNLYCQKNKENKNLYKLQKLHKQILCIADTSYEVPYKFESDEEVYQSVNGELDNISSKHIVERLRKIGDNYNGY
NLDKIYIVSKFYESVSQKTYRDWETINTALEIHYNNILPGNGKSKADKVKKAVKNDLQKSITEINELVSNYKLCSDDNIKAETY
IHEISHILNNFEAQELKYNPEIHLVESELKASELKNVLDVIMNAFHWCSVFMTEELVDKDNNFYAELEEIYDEIYPVISLYNLV
RNYVTQKPYSTKKIKLNFGIPTLADGWSKSKEYSNNAIILMRDNLYYLGIFNAKNKPDKKIIEGNTSENKGDYKKMIYNLLPGP
NKMIPKVFLSSKTGVETYKPSAYILEGYKQNKHIKSSKDFDITFCHDLIDYFKNCIAIHPEWKNFGFDFSDTSTYEDISGFYRE
VELQGYKIDWTYISEKDIDLLQEKGQLYLFQIYNKDFSKKSTGNDNLHTMYLKNLFSEENLKDIVLKLNGEAEIFFRKSSIKNP
IIHKKGSILVNRTYEAEEKDQFGNIQIVRKNIPENIYQELYKYFNDKSDKELSDEAAKLKNVVGHHEAATNIVKDYRYTYDKYF
LHMPITINFKANKTGFINDRILQYIAKEKDLHVIGIDRGERNLIYVSVIDTCGNIVEQKSFNIVNGYDYQIKLKQQEGARQIAR
KEWKEIGKIKEIKEGYLSLVIHEISKMVIKYNAIIAMEDLSYGFKKGRFKVERQVYQKFETMLINKLNYLVFKDISITENGGLL
KGYQLTYIPDKLKNVGHQCGCIFYVPAAYTSKIDPTTGFVNIFKFKDLTVDAKREFIKKFDSIRYDSEKNLFCFTEDYNNFITQ
NTVMSKSSWSVYTYGVRIKRRFVNGRFSNESDTIDITKDMEKTLEMTDINWRDGHDLRQDIIDYEIVQHIFEIFRLTVQMRNSL
SELEDRDYDRLISPVLNENNIFYDSAKAGDALPKDADANGAYCIALKGLYEIKQITENWKEDGKFSRDKLKISNKDWEDFIQNK
RYL
ErCas12a-G39Q-NT (SEQ ID NO: 7)
atgAATAACGGTACCAATAACTTTCAAAATTTTATCGGGATCTCCTCGTTGCAAAAAACTCTTCGTAATGCTTTAATCCCGACT
GAGACAACACAGCAGTTCATCGTTAAAAACCAGATCATTAAAGAAGATGAGCTGCGCGGCGAGAACCGTCAGATTTTAAAGGAC
ATCATGGACGACTATTACCGTGGGTTCATCTCAGAAACATTAAGCAGCATCGATGATATCGACTGGACCTCACTGTTTGAGAAG
ATGGAGATTCAACTTAAGAATGGAGACAACAAAGACACTTTAATTAAGGAGCAGACGGAATATCGTAAAGCTATCCATAAAAAA
TTTGCAAACGATGACCGTTTCAAAAATATGTTTTCCGCAAAATTGATTAGCGACATTTTACCTGAATTCGTAATCCATAACAAC
AACTATTCCGCATCTGAAAAAGAGGAGAAGACCCAAGTTATCAAACTTTTTTCACGTTTCGCGACATCTTTTAAAGACTACTTT
AAGAATCGTGCGAATTGTTTCAGTGCAGATGATATTTCGTCTAGTTCATGTCACCGTATCGTGAATGACAACGCTGAGATTTTC
TTTTCTAATGCGTTGGTGTATCGCCGCATCGTAAAGTCCTTGTCGAATGATGATATCAACAAAATTAGTGGTGACATGAAAGAC
TCCCTGAAAGAAATGTCATTAGAGGAGATTTACAGCTACGAAAAATACGGAGAGTTCATCACTCAGGAAGGTATCTCCTTTTAC
AACGATATTTGCGGCAAAGTTAATAGTTTCATGAATCTGTATTGTCAGAAGAATAAGGAAAACAAGAATCTGTACAAGTTACAA
AAGCTTCATAAACAGATCTTGTGCATCGCCGACACGTCTTATGAAGTCCCGTATAAATTTGAAAGCGACGAAGAAGTATATCAG
AGTGTGAATGGATTCTTGGACAATATCTCATCAAAACACATTGTTGAACGTTTGCGCAAAATCGGCGACAACTATAACGGATAC
AACTTGGATAAAATTTATATCGTATCAAAATTTTATGAATCAGTATCCCAAAAGACTTACCGTGATTGGGAGACTATTAATACG
GCGTTAGAAATCCATTACAACAACATTCTGCCGGGTAACGGTAAATCGAAAGCGGACAAAGTGAAGAAGGCGGTTAAGAACGAT
CTTCAGAAGTCTATCACGGAGATTAATGAGCTGGTTTCCAATTACAAGTTGTGCTCGGATGATAACATCAAAGCTGAAACCTAT
ATCCATGAAATTTCTCATATTCTTAATAACTTCGAGGCACAAGAATTAAAATATAACCCAGAAATTCATCTGGTTGAGAGCGAA
CTTAAAGCTTCAGAATTAAAAAATGTTTTGGACGTAATTATGAACGCCTTCCATTGGTGCAGCGTGTTTATGACAGAGGAGTTA
GTAGATAAGGATAACAACTTTTATGCAGAATTGGAAGAGATCTATGATGAGATCTATCCAGTGATTTCACTGTATAACTTAGTC
CGTAATTACGTCACTCAGAAGCCGTACTCAACTAAAAAGATCAAGTTAAATTTTGGAATTCCGACATTGGCGGATGGTTGGAGT
AAGTCTAAGGAATACTCAAATAACGCTATTATCTTAATGCGTGACAACCTGTATTACTTGGGTATTTTCAATGCCAAAAATAAG
CCCGATAAAAAAATCATTGAAGGGAATACTTCAGAAAATAAGGGAGATTACAAAAAAATGATTTATAACCTTTTGCCAGGCCCA
AACAAAATGATCCCCAAGGTGTTTTTGAGTAGTAAGACGGGAGTAGAAACATATAAGCCATCAGCGTACATTCTTGAAGGGTAC
AAACAAAATAAACACATCAAGAGCAGCAAGGACTTTGACATTACATTTTGTCATGACTTAATCGACTACTTTAAAAATTGCATT
GCCATTCACCCTGAGTGGAAAAATTTTGGTTTCGACTTCAGTGATACCTCTACCTATGAAGATATCTCTGGTTTTTATCGTGAG
GTAGAACTTCAGGGTTACAAGATCGATTGGACGTACATTTCCGAGAAAGACATTGATCTTTTACAAGAGAAGGGTCAGCTTTAC
TTATTTCAGATCTACAATAAAGACTTTTCGAAAAAATCCACGGGCAACGACAACCTTCATACAATGTACTTAAAGAACCTGTTC
TCTGAAGAAAACTTGAAAGATATCGTGCTTAAATTGAATGGCGAGGCCGAGATTTTTTTCCGTAAAAGCTCGATTAAGAATCCC
ATCATCCACAAGAAAGGCAGCATTCTGGTAAATCGTACCTATGAAGCGGAGGAAAAGGACCAATTTGGTAATATTCAGATTGTC
CGTAAGAACATCCCTGAAAATATCTATCAAGAATTATATAAATATTTCAACGATAAGTCGGACAAGGAACTTAGCGATGAAGCC
GCGAAGTTGAAAAATGTTGTTGGTCACCACGAAGCAGCAACAAACATTGTGAAAGACTATCGCTACACTTACGATAAGTACTTT
TTACATATGCCTATTACGATTAACTTTAAGGCAAATAAGACAGGTTTTATCAACGACCGTATCCTGCAATATATTGCAAAAGAG
AAGGACCTGCATGTCATTGGGATTGATCGCGGTGAACGCAATCTGATTTACGTGAGTGTTATTGATACCTGCGGTAATATTGTT
GAGCAAAAGTCTTTTAATATCGTTAATGGTTACGACTACCAAATTAAGCTTAAACAACAGGAAGGTGCCCGCCAGATCGCCCGT
AAGGAGTGGAAGGAAATCGGAAAAATTAAGGAAATCAAAGAGGGATATCTGAGCTTGGTTATTCATGAAATCTCAAAGATGGTT
ATTAAGTACAACGCCATCATCGCTATGGAAGACTTATCGTATGGGTTTAAAAAGGGTCGTTTCAAAGTTGAGCGCCAGGTCTAC
CAAAAGTTTGAAACGATGCTTATTAATAAATTAAACTACTTGGTTTTCAAAGATATCTCTATTACCGAGAATGGAGGTTTACTG
AAAGGATACCAGTTAACGTATATCCCCGATAAGCTTAAAAACGTGGGCCATCAGTGTGGCTGTATTTTCTATGTGCCCGCGGCA
TATACATCAAAAATTGACCCGACGACGGGTTTCGTTAATATCTTCAAGTTCAAAGATCTGACAGTTGATGCAAAACGCGAATTC
ATTAAGAAGTTCGATAGTATTCGCTATGACTCCGAGAAAAATTTGTTTTGCTTCACTTTTGACTACAATAACTTTATTACTCAG
AATACAGTCATGAGTAAAAGCTCCTGGTCGGTTTACACGTACGGGGTACGCATCAAACGTCGTTTTGTGAATGGTCGTTTTAGT
AATGAGTCGGATACAATTGATATTACCAAGGATATGGAGAAGACTCTGGAAATGACAGACATCAATTGGCGTGATGGACATGAT
TTGCGTCAGGACATTATCGACTATGAGATTGTGCAGCATATTTTCGAAATTTTTCGCCTGACGGTGCAAATGCGTAATTCCTTA
AGCGAACTGGAAGATCGCGACTATGACCGCTTAATTTCTCCTGTGCTGAATGAGAACAACATCTTCTATGACTCAGCGAAAGCC
GGGGACGCTTTGCCAAAGGATGCAGATGCTAACGGTGCATATTGTATTGCTCTGAAAGGCCTTTACGAGATCAAACAAATTACT
GAAAACTGGAAGGAAGATGGAAAGTTTTCCCGTGATAAATTGAAGATCTCTAATAAGGACTGGTTTGACTTTATCCAAAATAAA
CGTTATTTA
ErCas12a-G39Q-AA (SEQ ID NO: 8)
MNNGTNNFQNFIGISSLQKTLRNALIPTETTQQFIVKNQIIKEDELRGENRQILKDIMDDYYRGFISETLSSIDDIDWTSLFEK
MEIQLKNGDNKDTLIKEQTEYRKAIHKKFANDDRFKNMFSAKLISDILPEFVIHNNNYSASEKEEKTQVIKLFSRFATSFKDYF
KNRANCESADDISSSSCHRIVNDNAEIFFSNALVYRRIVKSLSNDDINKISGDMKDSLKEMSLEEIYSYEKYGEFITQEGISFY
NDICGKVNSFMNLYCQKNKENKNLYKLQKLHKQILCIADTSYEVPYKFESDEEVYQSVNGELDNISSKHIVERLRKIGDNYNGY
NLDKIYIVSKFYESVSQKTYRDWETINTALEIHYNNILPGNGKSKADKVKKAVKNDLQKSITEINELVSNYKLCSDDNIKAETY
IHEISHILNNFEAQELKYNPEIHLVESELKASELKNVLDVIMNAFHWCSVFMTEELVDKDNNFYAELEEIYDEIYPVISLYNLV
RNYVTQKPYSTKKIKLNFGIPTLADGWSKSKEYSNNAIILMRDNLYYLGIFNAKNKPDKKIIEGNTSENKGDYKKMIYNLLPGP
NKMIPKVFLSSKTGVETYKPSAYILEGYKQNKHIKSSKDFDITFCHDLIDYFKNCIAIHPEWKNFGFDFSDTSTYEDISGFYRE
VELQGYKIDWTYISEKDIDLLQEKGQLYLFQIYNKDFSKKSTGNDNLHTMYLKNLFSEENLKDIVLKLNGEAEIFFRKSSIKNP
IIHKKGSILVNRTYEAEEKDQFGNIQIVRKNIPENIYQELYKYFNDKSDKELSDEAAKLKNVVGHHEAATNIVKDYRYTYDKYF
LHMPITINFKANKTGFINDRILQYIAKEKDLHVIGIDRGERNLIYVSVIDTCGNIVEQKSFNIVNGYDYQIKLKQQEGARQIAR
KEWKEIGKIKEIKEGYLSLVIHEISKMVIKYNAIIAMEDLSYGFKKGRFKVERQVYQKFETMLINKLNYLVFKDISITENGGLL
KGYQLTYIPDKLKNVGHQCGCIFYVPAAYTSKIDPTTGFVNIFKFKDLTVDAKREFIKKFDSIRYDSEKNLFCFTFDYNNFITQ
NTVMSKSSWSVYTYGVRIKRRFVNGRFSNESDTIDITKDMEKTLEMTDINWRDGHDLRQDIIDYEIVQHIFEIFRLTVQMRNSL
SELEDRDYDRLISPVLNENNIFYDSAKAGDALPKDADANGAYCIALKGLYEIKQITENWKEDGKFSRDKLKISNKDWEDFIQNK
RYL
ErCas12a-G39K-NT (SEQ ID NO: 9)
atgAATAACGGTACCAATAACTTTCAAAATTTTATCGGGATCTCCTCGTTGCAAAAAACTCTTCGTAATGCTTTAATCCCGACT
GAGACAACACAGCAGTTCATCGTTAAAAACAAAATCATTAAAGAAGATGAGCTGCGCGGCGAGAACCGTCAGATTTTAAAGGAC
ATCATGGACGACTATTACCGTGGGTTCATCTCAGAAACATTAAGCAGCATCGATGATATCGACTGGACCTCACTGTTTGAGAAG
ATGGAGATTCAACTTAAGAATGGAGACAACAAAGACACTTTAATTAAGGAGCAGACGGAATATCGTAAAGCTATCCATAAAAAA
TTTGCAAACGATGACCGTTTCAAAAATATGTTTTCCGCAAAATTGATTAGCGACATTTTACCTGAATTCGTAATCCATAACAAC
AACTATTCCGCATCTGAAAAAGAGGAGAAGACCCAAGTTATCAAACTTTTTTCACGTTTCGCGACATCTTTTAAAGACTACTTT
AAGAATCGTGCGAATTGTTTCAGTGCAGATGATATTTCGTCTAGTTCATGTCACCGTATCGTGAATGACAACGCTGAGATTTTC
TTTTCTAATGCGTTGGTGTATCGCCGCATCGTAAAGTCCTTGTCGAATGATGATATCAACAAAATTAGTGGTGACATGAAAGAC
TCCCTGAAAGAAATGTCATTAGAGGAGATTTACAGCTACGAAAAATACGGAGAGTTCATCACTCAGGAAGGTATCTCCTTTTAC
AACGATATTTGCGGCAAAGTTAATAGTTTCATGAATCTGTATTGTCAGAAGAATAAGGAAAACAAGAATCTGTACAAGTTACAA
AAGCTTCATAAACAGATCTTGTGCATCGCCGACACGTCTTATGAAGTCCCGTATAAATTTGAAAGCGACGAAGAAGTATATCAG
AGTGTGAATGGATTCTTGGACAATATCTCATCAAAACACATTGTTGAACGTTTGCGCAAAATCGGCGACAACTATAACGGATAC
AACTTGGATAAAATTTATATCGTATCAAAATTTTATGAATCAGTATCCCAAAAGACTTACCGTGATTGGGAGACTATTAATACG
GCGTTAGAAATCCATTACAACAACATTCTGCCGGGTAACGGTAAATCGAAAGCGGACAAAGTGAAGAAGGCGGTTAAGAACGAT
CTTCAGAAGTCTATCACGGAGATTAATGAGCTGGTTTCCAATTACAAGTTGTGCTCGGATGATAACATCAAAGCTGAAACCTAT
ATCCATGAAATTTCTCATATTCTTAATAACTTCGAGGCACAAGAATTAAAATATAACCCAGAAATTCATCTGGTTGAGAGCGAA
CTTAAAGCTTCAGAATTAAAAAATGTTTTGGACGTAATTATGAACGCCTTCCATTGGTGCAGCGTGTTTATGACAGAGGAGTTA
GTAGATAAGGATAACAACTTTTATGCAGAATTGGAAGAGATCTATGATGAGATCTATCCAGTGATTTCACTGTATAACTTAGTC
CGTAATTACGTCACTCAGAAGCCGTACTCAACTAAAAAGATCAAGTTAAATTTTGGAATTCCGACATTGGCGGATGGTTGGAGT
AAGTCTAAGGAATACTCAAATAACGCTATTATCTTAATGCGTGACAACCTGTATTACTTGGGTATTTTCAATGCCAAAAATAAG
CCCGATAAAAAAATCATTGAAGGGAATACTTCAGAAAATAAGGGAGATTACAAAAAAATGATTTATAACCTTTTGCCAGGCCCA
AACAAAATGATCCCCAAGGTGTTTTTGAGTAGTAAGACGGGAGTAGAAACATATAAGCCATCAGCGTACATTCTTGAAGGGTAC
AAACAAAATAAACACATCAAGAGCAGCAAGGACTTTGACATTACATTTTGTCATGACTTAATCGACTACTTTAAAAATTGCATT
GCCATTCACCCTGAGTGGAAAAATTTTGGTTTCGACTTCAGTGATACCTCTACCTATGAAGATATCTCTGGTTTTTATCGTGAG
GTAGAACTTCAGGGTTACAAGATCGATTGGACGTACATTTCCGAGAAAGACATTGATCTTTTACAAGAGAAGGGTCAGCTTTAC
TTATTTCAGATCTACAATAAAGACTTTTCGAAAAAATCCACGGGCAACGACAACCTTCATACAATGTACTTAAAGAACCTGTTC
TCTGAAGAAAACTTGAAAGATATCGTGCTTAAATTGAATGGCGAGGCCGAGATTTTTTTCCGTAAAAGCTCGATTAAGAATCCC
ATCATCCACAAGAAAGGCAGCATTCTGGTAAATCGTACCTATGAAGCGGAGGAAAAGGACCAATTTGGTAATATTCAGATTGTC
CGTAAGAACATCCCTGAAAATATCTATCAAGAATTATATAAATATTTCAACGATAAGTCGGACAAGGAACTTAGCGATGAAGCC
GCGAAGTTGAAAAATGTTGTTGGTCACCACGAAGCAGCAACAAACATTGTGAAAGACTATCGCTACACTTACGATAAGTACTTT
TTACATATGCCTATTACGATTAACTTTAAGGCAAATAAGACAGGTTTTATCAACGACCGTATCCTGCAATATATTGCAAAAGAG
AAGGACCTGCATGTCATTGGGATTGATCGCGGTGAACGCAATCTGATTTACGTGAGTGTTATTGATACCTGCGGTAATATTGTT
GAGCAAAAGTCTTTTAATATCGTTAATGGTTACGACTACCAAATTAAGCTTAAACAACAGGAAGGTGCCCGCCAGATCGCCCGT
AAGGAGTGGAAGGAAATCGGAAAAATTAAGGAAATCAAAGAGGGATATCTGAGCTTGGTTATTCATGAAATCTCAAAGATGGTT
ATTAAGTACAACGCCATCATCGCTATGGAAGACTTATCGTATGGGTTTAAAAAGGGTCGTTTCAAAGTTGAGCGCCAGGTCTAC
CAAAAGTTTGAAACGATGCTTATTAATAAATTAAACTACTTGGTTTTCAAAGATATCTCTATTACCGAGAATGGAGGTTTACTG
AAAGGATACCAGTTAACGTATATCCCCGATAAGCTTAAAAACGTGGGCCATCAGTGTGGCTGTATTTTCTATGTGCCCGCGGCA
TATACATCAAAAATTGACCCGACGACGGGTTTCGTTAATATCTTCAAGTTCAAAGATCTGACAGTTGATGCAAAACGCGAATTC
ATTAAGAAGTTCGATAGTATTCGCTATGACTCCGAGAAAAATTTGTTTTGCTTCACTTTTGACTACAATAACTTTATTACTCAG
AATACAGTCATGAGTAAAAGCTCCTGGTCGGTTTACACGTACGGGGTACGCATCAAACGTCGTTTTGTGAATGGTCGTTTTAGT
AATGAGTCGGATACAATTGATATTACCAAGGATATGGAGAAGACTCTGGAAATGACAGACATCAATTGGCGTGATGGACATGAT
TTGCGTCAGGACATTATCGACTATGAGATTGTGCAGCATATTTTCGAAATTTTTCGCCTGACGGTGCAAATGCGTAATTCCTTA
AGCGAACTGGAAGATCGCGACTATGACCGCTTAATTTCTCCTGTGCTGAATGAGAACAACATCTTCTATGACTCAGCGAAAGCC
GGGGACGCTTTGCCAAAGGATGCAGATGCTAACGGTGCATATTGTATTGCTCTGAAAGGCCTTTACGAGATCAAACAAATTACT
GAAAACTGGAAGGAAGATGGAAAGTTTTCCCGTGATAAATTGAAGATCTCTAATAAGGACTGGTTTGACTTTATCCAAAATAAA
CGTTATTTA
ErCas12a-G39K-AA (SEQ ID NO: 10)
MNNGTNNFQNFIGISSLQKTLRNALIPTETTQQFIVKNKIIKEDELRGENRQILKDIMDDYYRGFISETLSSIDDIDWTSLFEK
MEIQLKNGDNKDTLIKEQTEYRKAIHKKFANDDRFKNMFSAKLISDILPEFVIHNNNYSASEKEEKTQVIKLFSRFATSFKDYF
KNRANCESADDISSSSCHRIVNDNAEIFFSNALVYRRIVKSLSNDDINKISGDMKDSLKEMSLEEIYSYEKYGEFITQEGISFY
NDICGKVNSFMNLYCQKNKENKNLYKLQKLHKQILCIADTSYEVPYKFESDEEVYQSVNGELDNISSKHIVERLRKIGDNYNGY
NLDKIYIVSKFYESVSQKTYRDWETINTALEIHYNNILPGNGKSKADKVKKAVKNDLQKSITEINELVSNYKLCSDDNIKAETY
IHEISHILNNFEAQELKYNPEIHLVESELKASELKNVLDVIMNAFHWCSVFMTEELVDKDNNFYAELEEIYDEIYPVISLYNLV
RNYVTQKPYSTKKIKLNFGIPTLADGWSKSKEYSNNAIILMRDNLYYLGIFNAKNKPDKKIIEGNTSENKGDYKKMIYNLLPGP
NKMIPKVFLSSKTGVETYKPSAYILEGYKQNKHIKSSKDFDITFCHDLIDYFKNCIAIHPEWKNFGFDFSDTSTYEDISGFYRE
VELQGYKIDWTYISEKDIDLLQEKGQLYLFQIYNKDFSKKSTGNDNLHTMYLKNLFSEENLKDIVLKLNGEAEIFFRKSSIKNP
IIHKKGSILVNRTYEAEEKDQFGNIQIVRKNIPENIYQELYKYFNDKSDKELSDEAAKLKNVVGHHEAATNIVKDYRYTYDKYF
LHMPITINFKANKTGFINDRILQYIAKEKDLHVIGIDRGERNLIYVSVIDTCGNIVEQKSFNIVNGYDYQIKLKQQEGARQIAR
KEWKEIGKIKEIKEGYLSLVIHEISKMVIKYNAIIAMEDLSYGFKKGRFKVERQVYQKFETMLINKLNYLVFKDISITENGGLL
KGYQLTYIPDKLKNVGHQCGCIFYVPAAYTSKIDPTTGFVNIFKFKDLTVDAKREFIKKFDSIRYDSEKNLFCFTEDYNNFITQ
NTVMSKSSWSVYTYGVRIKRRFVNGRFSNESDTIDITKDMEKTLEMTDINWRDGHDLRQDIIDYEIVQHIFEIFRLTVQMRNSL
SELEDRDYDRLISPVLNENNIFYDSAKAGDALPKDADANGAYCIALKGLYEIKQITENWKEDGKFSRDKLKISNKDWFDFIQNK
RYL
ErCas12a-I40Q-NT (SEQ ID NO: 11)
atgAATAACGGTACCAATAACTTTCAAAATTTTATCGGGATCTCCTCGTTGCAAAAAACTCTTCGTAATGCTTTAATCCCGACT
GAGACAACACAGCAGTTCATCGTTAAAAACGGCCAGATTAAAGAAGATGAGCTGCGCGGCGAGAACCGTCAGATTTTAAAGGAC
ATCATGGACGACTATTACCGTGGGTTCATCTCAGAAACATTAAGCAGCATCGATGATATCGACTGGACCTCACTGTTTGAGAAG
ATGGAGATTCAACTTAAGAATGGAGACAACAAAGACACTTTAATTAAGGAGCAGACGGAATATCGTAAAGCTATCCATAAAAAA
TTTGCAAACGATGACCGTTTCAAAAATATGTTTTCCGCAAAATTGATTAGCGACATTTTACCTGAATTCGTAATCCATAACAAC
AACTATTCCGCATCTGAAAAAGAGGAGAAGACCCAAGTTATCAAACTTTTTTCACGTTTCGCGACATCTTTTAAAGACTACTTT
AAGAATCGTGCGAATTGTTTCAGTGCAGATGATATTTCGTCTAGTTCATGTCACCGTATCGTGAATGACAACGCTGAGATTTTC
TTTTCTAATGCGTTGGTGTATCGCCGCATCGTAAAGTCCTTGTCGAATGATGATATCAACAAAATTAGTGGTGACATGAAAGAC
TCCCTGAAAGAAATGTCATTAGAGGAGATTTACAGCTACGAAAAATACGGAGAGTTCATCACTCAGGAAGGTATCTCCTTTTAC
AACGATATTTGCGGCAAAGTTAATAGTTTCATGAATCTGTATTGTCAGAAGAATAAGGAAAACAAGAATCTGTACAAGTTACAA
AAGCTTCATAAACAGATCTTGTGCATCGCCGACACGTCTTATGAAGTCCCGTATAAATTTGAAAGCGACGAAGAAGTATATCAG
AGTGTGAATGGATTCTTGGACAATATCTCATCAAAACACATTGTTGAACGTTTGCGCAAAATCGGCGACAACTATAACGGATAC
AACTTGGATAAAATTTATATCGTATCAAAATTTTATGAATCAGTATCCCAAAAGACTTACCGTGATTGGGAGACTATTAATACG
GCGTTAGAAATCCATTACAACAACATTCTGCCGGGTAACGGTAAATCGAAAGCGGACAAAGTGAAGAAGGCGGTTAAGAACGAT
CTTCAGAAGTCTATCACGGAGATTAATGAGCTGGTTTCCAATTACAAGTTGTGCTCGGATGATAACATCAAAGCTGAAACCTAT
ATCCATGAAATTTCTCATATTCTTAATAACTTCGAGGCACAAGAATTAAAATATAACCCAGAAATTCATCTGGTTGAGAGCGAA
CTTAAAGCTTCAGAATTAAAAAATGTTTTGGACGTAATTATGAACGCCTTCCATTGGTGCAGCGTGTTTATGACAGAGGAGTTA
GTAGATAAGGATAACAACTTTTATGCAGAATTGGAAGAGATCTATGATGAGATCTATCCAGTGATTTCACTGTATAACTTAGTC
CGTAATTACGTCACTCAGAAGCCGTACTCAACTAAAAAGATCAAGTTAAATTTTGGAATTCCGACATTGGCGGATGGTTGGAGT
AAGTCTAAGGAATACTCAAATAACGCTATTATCTTAATGCGTGACAACCTGTATTACTTGGGTATTTTCAATGCCAAAAATAAG
CCCGATAAAAAAATCATTGAAGGGAATACTTCAGAAAATAAGGGAGATTACAAAAAAATGATTTATAACCTTTTGCCAGGCCCA
AACAAAATGATCCCCAAGGTGTTTTTGAGTAGTAAGACGGGAGTAGAAACATATAAGCCATCAGCGTACATTCTTGAAGGGTAC
AAACAAAATAAACACATCAAGAGCAGCAAGGACTTTGACATTACATTTTGTCATGACTTAATCGACTACTTTAAAAATTGCATT
GCCATTCACCCTGAGTGGAAAAATTTTGGTTTCGACTTCAGTGATACCTCTACCTATGAAGATATCTCTGGTTTTTATCGTGAG
GTAGAACTTCAGGGTTACAAGATCGATTGGACGTACATTTCCGAGAAAGACATTGATCTTTTACAAGAGAAGGGTCAGCTTTAC
TTATTTCAGATCTACAATAAAGACTTTTCGAAAAAATCCACGGGCAACGACAACCTTCATACAATGTACTTAAAGAACCTGTTC
TCTGAAGAAAACTTGAAAGATATCGTGCTTAAATTGAATGGCGAGGCCGAGATTTTTTTCCGTAAAAGCTCGATTAAGAATCCC
ATCATCCACAAGAAAGGCAGCATTCTGGTAAATCGTACCTATGAAGCGGAGGAAAAGGACCAATTTGGTAATATTCAGATTGTC
CGTAAGAACATCCCTGAAAATATCTATCAAGAATTATATAAATATTTCAACGATAAGTCGGACAAGGAACTTAGCGATGAAGCC
GCGAAGTTGAAAAATGTTGTTGGTCACCACGAAGCAGCAACAAACATTGTGAAAGACTATCGCTACACTTACGATAAGTACTTT
TTACATATGCCTATTACGATTAACTTTAAGGCAAATAAGACAGGTTTTATCAACGACCGTATCCTGCAATATATTGCAAAAGAG
AAGGACCTGCATGTCATTGGGATTGATCGCGGTGAACGCAATCTGATTTACGTGAGTGTTATTGATACCTGCGGTAATATTGTT
GAGCAAAAGTCTTTTAATATCGTTAATGGTTACGACTACCAAATTAAGCTTAAACAACAGGAAGGTGCCCGCCAGATCGCCCGT
AAGGAGTGGAAGGAAATCGGAAAAATTAAGGAAATCAAAGAGGGATATCTGAGCTTGGTTATTCATGAAATCTCAAAGATGGTT
ATTAAGTACAACGCCATCATCGCTATGGAAGACTTATCGTATGGGTTTAAAAAGGGTCGTTTCAAAGTTGAGCGCCAGGTCTAC
CAAAAGTTTGAAACGATGCTTATTAATAAATTAAACTACTTGGTTTTCAAAGATATCTCTATTACCGAGAATGGAGGTTTACTG
AAAGGATACCAGTTAACGTATATCCCCGATAAGCTTAAAAACGTGGGCCATCAGTGTGGCTGTATTTTCTATGTGCCCGCGGCA
TATACATCAAAAATTGACCCGACGACGGGTTTCGTTAATATCTTCAAGTTCAAAGATCTGACAGTTGATGCAAAACGCGAATTC
ATTAAGAAGTTCGATAGTATTCGCTATGACTCCGAGAAAAATTTGTTTTGCTTCACTTTTGACTACAATAACTTTATTACTCAG
AATACAGTCATGAGTAAAAGCTCCTGGTCGGTTTACACGTACGGGGTACGCATCAAACGTCGTTTTGTGAATGGTCGTTTTAGT
AATGAGTCGGATACAATTGATATTACCAAGGATATGGAGAAGACTCTGGAAATGACAGACATCAATTGGCGTGATGGACATGAT
TTGCGTCAGGACATTATCGACTATGAGATTGTGCAGCATATTTTCGAAATTTTTCGCCTGACGGTGCAAATGCGTAATTCCTTA
AGCGAACTGGAAGATCGCGACTATGACCGCTTAATTTCTCCTGTGCTGAATGAGAACAACATCTTCTATGACTCAGCGAAAGCC
GGGGACGCTTTGCCAAAGGATGCAGATGCTAACGGTGCATATTGTATTGCTCTGAAAGGCCTTTACGAGATCAAACAAATTACT
GAAAACTGGAAGGAAGATGGAAAGTTTTCCCGTGATAAATTGAAGATCTCTAATAAGGACTGGTTTGACTTTATCCAAAATAAA
CGTTATTTA
ErCas12a-I40Q-AA (SEQ ID NO: 12)
MNNGTNNFQNFIGISSLQKTLRNALIPTETTQQFIVKNGQIKEDELRGENRQILKDIMDDYYRGFISETLSSIDDIDWTSLFEK
MEIQLKNGDNKDTLIKEQTEYRKAIHKKFANDDRFKNMFSAKLISDILPEFVIHNNNYSASEKEEKTQVIKLFSRFATSFKDYF
KNRANCESADDISSSSCHRIVNDNAEIFFSNALVYRRIVKSLSNDDINKISGDMKDSLKEMSLEEIYSYEKYGEFITQEGISFY
NDICGKVNSFMNLYCQKNKENKNLYKLQKLHKQILCIADTSYEVPYKFESDEEVYQSVNGELDNISSKHIVERLRKIGDNYNGY
NLDKIYIVSKFYESVSQKTYRDWETINTALEIHYNNILPGNGKSKADKVKKAVKNDLQKSITEINELVSNYKLCSDDNIKAETY
IHEISHILNNFEAQELKYNPEIHLVESELKASELKNVLDVIMNAFHWCSVFMTEELVDKDNNFYAELEEIYDEIYPVISLYNLV
RNYVTQKPYSTKKIKLNFGIPTLADGWSKSKEYSNNAIILMRDNLYYLGIFNAKNKPDKKIIEGNTSENKGDYKKMIYNLLPGP
NKMIPKVFLSSKTGVETYKPSAYILEGYKQNKHIKSSKDFDITFCHDLIDYFKNCIAIHPEWKNFGFDFSDTSTYEDISGFYRE
VELQGYKIDWTYISEKDIDLLQEKGQLYLFQIYNKDFSKKSTGNDNLHTMYLKNLFSEENLKDIVLKLNGEAEIFFRKSSIKNP
IIHKKGSILVNRTYEAEEKDQFGNIQIVRKNIPENIYQELYKYFNDKSDKELSDEAAKLKNVVGHHEAATNIVKDYRYTYDKYF
LHMPITINFKANKTGFINDRILQYIAKEKDLHVIGIDRGERNLIYVSVIDTCGNIVEQKSFNIVNGYDYQIKLKQQEGARQIAR
KEWKEIGKIKEIKEGYLSLVIHEISKMVIKYNAIIAMEDLSYGFKKGRFKVERQVYQKFETMLINKLNYLVFKDISITENGGLL
KGYQLTYIPDKLKNVGHQCGCIFYVPAAYTSKIDPTTGFVNIFKFKDLTVDAKREFIKKFDSIRYDSEKNLFCFTEDYNNFITQ
NTVMSKSSWSVYTYGVRIKRRFVNGRFSNESDTIDITKDMEKTLEMTDINWRDGHDLRQDIIDYEIVQHIFEIFRLTVQMRNSL
SELEDRDYDRLISPVLNENNIFYDSAKAGDALPKDADANGAYCIALKGLYEIKQITENWKEDGKFSRDKLKISNKDWEDFIQNK
RYL
ErCas12a-D56R-NT (SEQ ID NO: 13)
atgAATAACGGTACCAATAACTTTCAAAATTTTATCGGGATCTCCTCGTTGCAAAAAACTCTTCGTAATGCTTTAATCCCGACT
GAGACAACACAGCAGTTCATCGTTAAAAACGGCATCATTAAAGAAGATGAGCTGCGCGGCGAGAACCGTCAGATTTTAAAGCGT
ATCATGGACGACTATTACCGTGGGTTCATCTCAGAAACATTAAGCAGCATCGATGATATCGACTGGACCTCACTGTTTGAGAAG
ATGGAGATTCAACTTAAGAATGGAGACAACAAAGACACTTTAATTAAGGAGCAGACGGAATATCGTAAAGCTATCCATAAAAAA
TTTGCAAACGATGACCGTTTCAAAAATATGTTTTCCGCAAAATTGATTAGCGACATTTTACCTGAATTCGTAATCCATAACAAC
AACTATTCCGCATCTGAAAAAGAGGAGAAGACCCAAGTTATCAAACTTTTTTCACGTTTCGCGACATCTTTTAAAGACTACTTT
AAGAATCGTGCGAATTGTTTCAGTGCAGATGATATTTCGTCTAGTTCATGTCACCGTATCGTGAATGACAACGCTGAGATTTTC
TTTTCTAATGCGTTGGTGTATCGCCGCATCGTAAAGTCCTTGTCGAATGATGATATCAACAAAATTAGTGGTGACATGAAAGAC
TCCCTGAAAGAAATGTCATTAGAGGAGATTTACAGCTACGAAAAATACGGAGAGTTCATCACTCAGGAAGGTATCTCCTTTTAC
AACGATATTTGCGGCAAAGTTAATAGTTTCATGAATCTGTATTGTCAGAAGAATAAGGAAAACAAGAATCTGTACAAGTTACAA
AAGCTTCATAAACAGATCTTGTGCATCGCCGACACGTCTTATGAAGTCCCGTATAAATTTGAAAGCGACGAAGAAGTATATCAG
AGTGTGAATGGATTCTTGGACAATATCTCATCAAAACACATTGTTGAACGTTTGCGCAAAATCGGCGACAACTATAACGGATAC
AACTTGGATAAAATTTATATCGTATCAAAATTTTATGAATCAGTATCCCAAAAGACTTACCGTGATTGGGAGACTATTAATACG
GCGTTAGAAATCCATTACAACAACATTCTGCCGGGTAACGGTAAATCGAAAGCGGACAAAGTGAAGAAGGCGGTTAAGAACGAT
CTTCAGAAGTCTATCACGGAGATTAATGAGCTGGTTTCCAATTACAAGTTGTGCTCGGATGATAACATCAAAGCTGAAACCTAT
ATCCATGAAATTTCTCATATTCTTAATAACTTCGAGGCACAAGAATTAAAATATAACCCAGAAATTCATCTGGTTGAGAGCGAA
CTTAAAGCTTCAGAATTAAAAAATGTTTTGGACGTAATTATGAACGCCTTCCATTGGTGCAGCGTGTTTATGACAGAGGAGTTA
GTAGATAAGGATAACAACTTTTATGCAGAATTGGAAGAGATCTATGATGAGATCTATCCAGTGATTTCACTGTATAACTTAGTC
CGTAATTACGTCACTCAGAAGCCGTACTCAACTAAAAAGATCAAGTTAAATTTTGGAATTCCGACATTGGCGGATGGTTGGAGT
AAGTCTAAGGAATACTCAAATAACGCTATTATCTTAATGCGTGACAACCTGTATTACTTGGGTATTTTCAATGCCAAAAATAAG
CCCGATAAAAAAATCATTGAAGGGAATACTTCAGAAAATAAGGGAGATTACAAAAAAATGATTTATAACCTTTTGCCAGGCCCA
AACAAAATGATCCCCAAGGTGTTTTTGAGTAGTAAGACGGGAGTAGAAACATATAAGCCATCAGCGTACATTCTTGAAGGGTAC
AAACAAAATAAACACATCAAGAGCAGCAAGGACTTTGACATTACATTTTGTCATGACTTAATCGACTACTTTAAAAATTGCATT
GCCATTCACCCTGAGTGGAAAAATTTTGGTTTCGACTTCAGTGATACCTCTACCTATGAAGATATCTCTGGTTTTTATCGTGAG
GTAGAACTTCAGGGTTACAAGATCGATTGGACGTACATTTCCGAGAAAGACATTGATCTTTTACAAGAGAAGGGTCAGCTTTAC
TTATTTCAGATCTACAATAAAGACTTTTCGAAAAAATCCACGGGCAACGACAACCTTCATACAATGTACTTAAAGAACCTGTTC
TCTGAAGAAAACTTGAAAGATATCGTGCTTAAATTGAATGGCGAGGCCGAGATTTTTTTCCGTAAAAGCTCGATTAAGAATCCC
ATCATCCACAAGAAAGGCAGCATTCTGGTAAATCGTACCTATGAAGCGGAGGAAAAGGACCAATTTGGTAATATTCAGATTGTC
CGTAAGAACATCCCTGAAAATATCTATCAAGAATTATATAAATATTTCAACGATAAGTCGGACAAGGAACTTAGCGATGAAGCC
GCGAAGTTGAAAAATGTTGTTGGTCACCACGAAGCAGCAACAAACATTGTGAAAGACTATCGCTACACTTACGATAAGTACTTT
TTACATATGCCTATTACGATTAACTTTAAGGCAAATAAGACAGGTTTTATCAACGACCGTATCCTGCAATATATTGCAAAAGAG
AAGGACCTGCATGTCATTGGGATTGATCGCGGTGAACGCAATCTGATTTACGTGAGTGTTATTGATACCTGCGGTAATATTGTT
GAGCAAAAGTCTTTTAATATCGTTAATGGTTACGACTACCAAATTAAGCTTAAACAACAGGAAGGTGCCCGCCAGATCGCCCGT
AAGGAGTGGAAGGAAATCGGAAAAATTAAGGAAATCAAAGAGGGATATCTGAGCTTGGTTATTCATGAAATCTCAAAGATGGTT
ATTAAGTACAACGCCATCATCGCTATGGAAGACTTATCGTATGGGTTTAAAAAGGGTCGTTTCAAAGTTGAGCGCCAGGTCTAC
CAAAAGTTTGAAACGATGCTTATTAATAAATTAAACTACTTGGTTTTCAAAGATATCTCTATTACCGAGAATGGAGGTTTACTG
AAAGGATACCAGTTAACGTATATCCCCGATAAGCTTAAAAACGTGGGCCATCAGTGTGGCTGTATTTTCTATGTGCCCGCGGCA
TATACATCAAAAATTGACCCGACGACGGGTTTCGTTAATATCTTCAAGTTCAAAGATCTGACAGTTGATGCAAAACGCGAATTC
ATTAAGAAGTTCGATAGTATTCGCTATGACTCCGAGAAAAATTTGTTTTGCTTCACTTTTGACTACAATAACTTTATTACTCAG
AATACAGTCATGAGTAAAAGCTCCTGGTCGGTTTACACGTACGGGGTACGCATCAAACGTCGTTTTGTGAATGGTCGTTTTAGT
AATGAGTCGGATACAATTGATATTACCAAGGATATGGAGAAGACTCTGGAAATGACAGACATCAATTGGCGTGATGGACATGAT
TTGCGTCAGGACATTATCGACTATGAGATTGTGCAGCATATTTTCGAAATTTTTCGCCTGACGGTGCAAATGCGTAATTCCTTA
AGCGAACTGGAAGATCGCGACTATGACCGCTTAATTTCTCCTGTGCTGAATGAGAACAACATCTTCTATGACTCAGCGAAAGCC
GGGGACGCTTTGCCAAAGGATGCAGATGCTAACGGTGCATATTGTATTGCTCTGAAAGGCCTTTACGAGATCAAACAAATTACT
GAAAACTGGAAGGAAGATGGAAAGTTTTCCCGTGATAAATTGAAGATCTCTAATAAGGACTGGTTTGACTTTATCCAAAATAAA
CGTTATTTA
ErCas12a-D56R-AA (SEQ ID NO: 14)
MNNGTNNFQNFIGISSLQKTLRNALIPTETTQQFIVKNGIIKEDELRGENRQILKRIMDDYYRGFISETLSSIDDIDWTSLFEK
MEIQLKNGDNKDTLIKEQTEYRKAIHKKFANDDRFKNMFSAKLISDILPEFVIHNNNYSASEKEEKTQVIKLESRFATSFKDYF
KNRANCFSADDISSSSCHRIVNDNAEIFFSNALVYRRIVKSLSNDDINKISGDMKDSLKEMSLEEIYSYEKYGEFITQEGISFY
NDICGKVNSFMNLYCQKNKENKNLYKLQKLHKQILCIADTSYEVPYKFESDEEVYQSVNGELDNISSKHIVERLRKIGDNYNGY
NLDKIYIVSKFYESVSQKTYRDWETINTALEIHYNNILPGNGKSKADKVKKAVKNDLQKSITEINELVSNYKLCSDDNIKAETY
IHEISHILNNFEAQELKYNPEIHLVESELKASELKNVLDVIMNAFHWCSVFMTEELVDKDNNFYAELEEIYDEIYPVISLYNLV
RNYVTQKPYSTKKIKLNFGIPTLADGWSKSKEYSNNAIILMRDNLYYLGIFNAKNKPDKKIIEGNTSENKGDYKKMIYNLLPGP
NKMIPKVFLSSKTGVETYKPSAYILEGYKQNKHIKSSKDFDITFCHDLIDYFKNCIAIHPEWKNFGFDFSDTSTYEDISGFYRE
VELQGYKIDWTYISEKDIDLLQEKGQLYLFQIYNKDFSKKSTGNDNLHTMYLKNLFSEENLKDIVLKLNGEAEIFFRKSSIKNP
IIHKKGSILVNRTYEAEEKDQFGNIQIVRKNIPENIYQELYKYFNDKSDKELSDEAAKLKNVVGHHEAATNIVKDYRYTYDKYF
LHMPITINFKANKTGFINDRILQYIAKEKDLHVIGIDRGERNLIYVSVIDTCGNIVEQKSFNIVNGYDYQIKLKQQEGARQIAR
KEWKEIGKIKEIKEGYLSLVIHEISKMVIKYNAIIAMEDLSYGFKKGRFKVERQVYQKFETMLINKLNYLVFKDISITENGGLL
KGYQLTYIPDKLKNVGHQCGCIFYVPAAYTSKIDPTTGFVNIFKFKDLTVDAKREFIKKFDSIRYDSEKNLFCFTEDYNNFITQ
NTVMSKSSWSVYTYGVRIKRRFVNGRFSNESDTIDITKDMEKTLEMTDINWRDGHDLRQDIIDYEIVQHIFEIFRLTVQMRNSL
SELEDRDYDRLISPVLNENNIFYDSAKAGDALPKDADANGAYCIALKGLYEIKQITENWKEDGKFSRDKLKISNKDWEDFIQNK
RYL
ErCas12a-D56P-NT (SEQ ID NO: 15)
atgAATAACGGTACCAATAACTTTCAAAATTTTATCGGGATCTCCTCGTTGCAAAAAACTCTTCGTAATGCTTTAATCCCGACT
GAGACAACACAGCAGTTCATCGTTAAAAACGGCATCATTAAAGAAGATGAGCTGCGCGGCGAGAACCGTCAGATTTTAAAGCCG
ATCATGGACGACTATTACCGTGGGTTCATCTCAGAAACATTAAGCAGCATCGATGATATCGACTGGACCTCACTGTTTGAGAAG
ATGGAGATTCAACTTAAGAATGGAGACAACAAAGACACTTTAATTAAGGAGCAGACGGAATATCGTAAAGCTATCCATAAAAAA
TTTGCAAACGATGACCGTTTCAAAAATATGTTTTCCGCAAAATTGATTAGCGACATTTTACCTGAATTCGTAATCCATAACAAC
AACTATTCCGCATCTGAAAAAGAGGAGAAGACCCAAGTTATCAAACTTTTTTCACGTTTCGCGACATCTTTTAAAGACTACTTT
AAGAATCGTGCGAATTGTTTCAGTGCAGATGATATTTCGTCTAGTTCATGTCACCGTATCGTGAATGACAACGCTGAGATTTTC
TTTTCTAATGCGTTGGTGTATCGCCGCATCGTAAAGTCCTTGTCGAATGATGATATCAACAAAATTAGTGGTGACATGAAAGAC
TCCCTGAAAGAAATGTCATTAGAGGAGATTTACAGCTACGAAAAATACGGAGAGTTCATCACTCAGGAAGGTATCTCCTTTTAC
AACGATATTTGCGGCAAAGTTAATAGTTTCATGAATCTGTATTGTCAGAAGAATAAGGAAAACAAGAATCTGTACAAGTTACAA
AAGCTTCATAAACAGATCTTGTGCATCGCCGACACGTCTTATGAAGTCCCGTATAAATTTGAAAGCGACGAAGAAGTATATCAG
AGTGTGAATGGATTCTTGGACAATATCTCATCAAAACACATTGTTGAACGTTTGCGCAAAATCGGCGACAACTATAACGGATAC
AACTTGGATAAAATTTATATCGTATCAAAATTTTATGAATCAGTATCCCAAAAGACTTACCGTGATTGGGAGACTATTAATACG
GCGTTAGAAATCCATTACAACAACATTCTGCCGGGTAACGGTAAATCGAAAGCGGACAAAGTGAAGAAGGCGGTTAAGAACGAT
CTTCAGAAGTCTATCACGGAGATTAATGAGCTGGTTTCCAATTACAAGTTGTGCTCGGATGATAACATCAAAGCTGAAACCTAT
ATCCATGAAATTTCTCATATTCTTAATAACTTCGAGGCACAAGAATTAAAATATAACCCAGAAATTCATCTGGTTGAGAGCGAA
CTTAAAGCTTCAGAATTAAAAAATGTTTTGGACGTAATTATGAACGCCTTCCATTGGTGCAGCGTGTTTATGACAGAGGAGTTA
GTAGATAAGGATAACAACTTTTATGCAGAATTGGAAGAGATCTATGATGAGATCTATCCAGTGATTTCACTGTATAACTTAGTC
CGTAATTACGTCACTCAGAAGCCGTACTCAACTAAAAAGATCAAGTTAAATTTTGGAATTCCGACATTGGCGGATGGTTGGAGT
AAGTCTAAGGAATACTCAAATAACGCTATTATCTTAATGCGTGACAACCTGTATTACTTGGGTATTTTCAATGCCAAAAATAAG
CCCGATAAAAAAATCATTGAAGGGAATACTTCAGAAAATAAGGGAGATTACAAAAAAATGATTTATAACCTTTTGCCAGGCCCA
AACAAAATGATCCCCAAGGTGTTTTTGAGTAGTAAGACGGGAGTAGAAACATATAAGCCATCAGCGTACATTCTTGAAGGGTAC
AAACAAAATAAACACATCAAGAGCAGCAAGGACTTTGACATTACATTTTGTCATGACTTAATCGACTACTTTAAAAATTGCATT
GCCATTCACCCTGAGTGGAAAAATTTTGGTTTCGACTTCAGTGATACCTCTACCTATGAAGATATCTCTGGTTTTTATCGTGAG
GTAGAACTTCAGGGTTACAAGATCGATTGGACGTACATTTCCGAGAAAGACATTGATCTTTTACAAGAGAAGGGTCAGCTTTAC
TTATTTCAGATCTACAATAAAGACTTTTCGAAAAAATCCACGGGCAACGACAACCTTCATACAATGTACTTAAAGAACCTGTTC
TCTGAAGAAAACTTGAAAGATATCGTGCTTAAATTGAATGGCGAGGCCGAGATTTTTTTCCGTAAAAGCTCGATTAAGAATCCC
ATCATCCACAAGAAAGGCAGCATTCTGGTAAATCGTACCTATGAAGCGGAGGAAAAGGACCAATTTGGTAATATTCAGATTGTC
CGTAAGAACATCCCTGAAAATATCTATCAAGAATTATATAAATATTTCAACGATAAGTCGGACAAGGAACTTAGCGATGAAGCC
GCGAAGTTGAAAAATGTTGTTGGTCACCACGAAGCAGCAACAAACATTGTGAAAGACTATCGCTACACTTACGATAAGTACTTT
TTACATATGCCTATTACGATTAACTTTAAGGCAAATAAGACAGGTTTTATCAACGACCGTATCCTGCAATATATTGCAAAAGAG
AAGGACCTGCATGTCATTGGGATTGATCGCGGTGAACGCAATCTGATTTACGTGAGTGTTATTGATACCTGCGGTAATATTGTT
GAGCAAAAGTCTTTTAATATCGTTAATGGTTACGACTACCAAATTAAGCTTAAACAACAGGAAGGTGCCCGCCAGATCGCCCGT
AAGGAGTGGAAGGAAATCGGAAAAATTAAGGAAATCAAAGAGGGATATCTGAGCTTGGTTATTCATGAAATCTCAAAGATGGTT
ATTAAGTACAACGCCATCATCGCTATGGAAGACTTATCGTATGGGTTTAAAAAGGGTCGTTTCAAAGTTGAGCGCCAGGTCTAC
CAAAAGTTTGAAACGATGCTTATTAATAAATTAAACTACTTGGTTTTCAAAGATATCTCTATTACCGAGAATGGAGGTTTACTG
AAAGGATACCAGTTAACGTATATCCCCGATAAGCTTAAAAACGTGGGCCATCAGTGTGGCTGTATTTTCTATGTGCCCGCGGCA
TATACATCAAAAATTGACCCGACGACGGGTTTCGTTAATATCTTCAAGTTCAAAGATCTGACAGTTGATGCAAAACGCGAATTC
ATTAAGAAGTTCGATAGTATTCGCTATGACTCCGAGAAAAATTTGTTTTGCTTCACTTTTGACTACAATAACTTTATTACTCAG
AATACAGTCATGAGTAAAAGCTCCTGGTCGGTTTACACGTACGGGGTACGCATCAAACGTCGTTTTGTGAATGGTCGTTTTAGT
AATGAGTCGGATACAATTGATATTACCAAGGATATGGAGAAGACTCTGGAAATGACAGACATCAATTGGCGTGATGGACATGAT
TTGCGTCAGGACATTATCGACTATGAGATTGTGCAGCATATTTTCGAAATTTTTCGCCTGACGGTGCAAATGCGTAATTCCTTA
AGCGAACTGGAAGATCGCGACTATGACCGCTTAATTTCTCCTGTGCTGAATGAGAACAACATCTTCTATGACTCAGCGAAAGCC
GGGGACGCTTTGCCAAAGGATGCAGATGCTAACGGTGCATATTGTATTGCTCTGAAAGGCCTTTACGAGATCAAACAAATTACT
GAAAACTGGAAGGAAGATGGAAAGTTTTCCCGTGATAAATTGAAGATCTCTAATAAGGACTGGTTTGACTTTATCCAAAATAAA
CGTTATTTA
ErCas12a-D56P-AA (SEQ ID NO: 16)
MNNGTNNFQNFIGISSLQKTLRNALIPTETTQQFIVKNGIIKEDELRGENRQILKPIMDDYYRGFISETLSSIDDIDWTSLFEK
MEIQLKNGDNKDTLIKEQTEYRKAIHKKFANDDRFKNMFSAKLISDILPEFVIHNNNYSASEKEEKTQVIKLFSRFATSFKDYF
KNRANCESADDISSSSCHRIVNDNAEIFFSNALVYRRIVKSLSNDDINKISGDMKDSLKEMSLEEIYSYEKYGEFITQEGISFY
NDICGKVNSFMNLYCQKNKENKNLYKLQKLHKQILCIADTSYEVPYKFESDEEVYQSVNGFLDNISSKHIVERLRKIGDNYNGY
NLDKIYIVSKFYESVSQKTYRDWETINTALEIHYNNILPGNGKSKADKVKKAVKNDLQKSITEINELVSNYKLCSDDNIKAETY
IHEISHILNNFEAQELKYNPEIHLVESELKASELKNVLDVIMNAFHWCSVFMTEELVDKDNNFYAELEEIYDEIYPVISLYNLV
RNYVTQKPYSTKKIKLNFGIPTLADGWSKSKEYSNNAIILMRDNLYYLGIFNAKNKPDKKIIEGNTSENKGDYKKMIYNLLPGP
NKMIPKVFLSSKTGVETYKPSAYILEGYKQNKHIKSSKDFDITFCHDLIDYFKNCIAIHPEWKNFGFDFSDTSTYEDISGFYRE
VELQGYKIDWTYISEKDIDLLQEKGQLYLFQIYNKDFSKKSTGNDNLHTMYLKNLFSEENLKDIVLKLNGEAEIFFRKSSIKNP
IIHKKGSILVNRTYEAEEKDQFGNIQIVRKNIPENIYQELYKYFNDKSDKELSDEAAKLKNVVGHHEAATNIVKDYRYTYDKYF
LHMPITINFKANKTGFINDRILQYIAKEKDLHVIGIDRGERNLIYVSVIDTCGNIVEQKSFNIVNGYDYQIKLKQQEGARQIAR
KEWKEIGKIKEIKEGYLSLVIHEISKMVIKYNAIIAMEDLSYGFKKGRFKVERQVYQKFETMLINKLNYLVFKDISITENGGLL
KGYQLTYIPDKLKNVGHQCGCIFYVPAAYTSKIDPTTGFVNIFKFKDLTVDAKREFIKKFDSIRYDSEKNLFCFTEDYNNFITQ
NTVMSKSSWSVYTYGVRIKRRFVNGRFSNESDTIDITKDMEKTLEMTDINWRDGHDLRQDIIDYEIVQHIFEIFRLTVQMRNSL
SELEDRDYDRLISPVLNENNIFYDSAKAGDALPKDADANGAYCIALKGLYEIKQITENWKEDGKFSRDKLKISNKDWFDFIQNK
RYL
ErCas12a-D59R-NT (SEQ ID NO: 17)
atgAATAACGGTACCAATAACTTTCAAAATTTTATCGGGATCTCCTCGTTGCAAAAAACTCTTCGTAATGCTTTAATCCCGACT
GAGACAACACAGCAGTTCATCGTTAAAAACGGCATCATTAAAGAAGATGAGCTGCGCGGCGAGAACCGTCAGATTTTAAAGGAC
ATCATGCGTGACTATTACCGTGGGTTCATCTCAGAAACATTAAGCAGCATCGATGATATCGACTGGACCTCACTGTTTGAGAAG
ATGGAGATTCAACTTAAGAATGGAGACAACAAAGACACTTTAATTAAGGAGCAGACGGAATATCGTAAAGCTATCCATAAAAAA
TTTGCAAACGATGACCGTTTCAAAAATATGTTTTCCGCAAAATTGATTAGCGACATTTTACCTGAATTCGTAATCCATAACAAC
AACTATTCCGCATCTGAAAAAGAGGAGAAGACCCAAGTTATCAAACTTTTTTCACGTTTCGCGACATCTTTTAAAGACTACTTT
AAGAATCGTGCGAATTGTTTCAGTGCAGATGATATTTCGTCTAGTTCATGTCACCGTATCGTGAATGACAACGCTGAGATTTTC
TTTTCTAATGCGTTGGTGTATCGCCGCATCGTAAAGTCCTTGTCGAATGATGATATCAACAAAATTAGTGGTGACATGAAAGAC
TCCCTGAAAGAAATGTCATTAGAGGAGATTTACAGCTACGAAAAATACGGAGAGTTCATCACTCAGGAAGGTATCTCCTTTTAC
AACGATATTTGCGGCAAAGTTAATAGTTTCATGAATCTGTATTGTCAGAAGAATAAGGAAAACAAGAATCTGTACAAGTTACAA
AAGCTTCATAAACAGATCTTGTGCATCGCCGACACGTCTTATGAAGTCCCGTATAAATTTGAAAGCGACGAAGAAGTATATCAG
AGTGTGAATGGATTCTTGGACAATATCTCATCAAAACACATTGTTGAACGTTTGCGCAAAATCGGCGACAACTATAACGGATAC
AACTTGGATAAAATTTATATCGTATCAAAATTTTATGAATCAGTATCCCAAAAGACTTACCGTGATTGGGAGACTATTAATACG
GCGTTAGAAATCCATTACAACAACATTCTGCCGGGTAACGGTAAATCGAAAGCGGACAAAGTGAAGAAGGCGGTTAAGAACGAT
CTTCAGAAGTCTATCACGGAGATTAATGAGCTGGTTTCCAATTACAAGTTGTGCTCGGATGATAACATCAAAGCTGAAACCTAT
ATCCATGAAATTTCTCATATTCTTAATAACTTCGAGGCACAAGAATTAAAATATAACCCAGAAATTCATCTGGTTGAGAGCGAA
CTTAAAGCTTCAGAATTAAAAAATGTTTTGGACGTAATTATGAACGCCTTCCATTGGTGCAGCGTGTTTATGACAGAGGAGTTA
GTAGATAAGGATAACAACTTTTATGCAGAATTGGAAGAGATCTATGATGAGATCTATCCAGTGATTTCACTGTATAACTTAGTC
CGTAATTACGTCACTCAGAAGCCGTACTCAACTAAAAAGATCAAGTTAAATTTTGGAATTCCGACATTGGCGGATGGTTGGAGT
AAGTCTAAGGAATACTCAAATAACGCTATTATCTTAATGCGTGACAACCTGTATTACTTGGGTATTTTCAATGCCAAAAATAAG
CCCGATAAAAAAATCATTGAAGGGAATACTTCAGAAAATAAGGGAGATTACAAAAAAATGATTTATAACCTTTTGCCAGGCCCA
AACAAAATGATCCCCAAGGTGTTTTTGAGTAGTAAGACGGGAGTAGAAACATATAAGCCATCAGCGTACATTCTTGAAGGGTAC
AAACAAAATAAACACATCAAGAGCAGCAAGGACTTTGACATTACATTTTGTCATGACTTAATCGACTACTTTAAAAATTGCATT
GCCATTCACCCTGAGTGGAAAAATTTTGGTTTCGACTTCAGTGATACCTCTACCTATGAAGATATCTCTGGTTTTTATCGTGAG
GTAGAACTTCAGGGTTACAAGATCGATTGGACGTACATTTCCGAGAAAGACATTGATCTTTTACAAGAGAAGGGTCAGCTTTAC
TTATTTCAGATCTACAATAAAGACTTTTCGAAAAAATCCACGGGCAACGACAACCTTCATACAATGTACTTAAAGAACCTGTTC
TCTGAAGAAAACTTGAAAGATATCGTGCTTAAATTGAATGGCGAGGCCGAGATTTTTTTCCGTAAAAGCTCGATTAAGAATCCC
ATCATCCACAAGAAAGGCAGCATTCTGGTAAATCGTACCTATGAAGCGGAGGAAAAGGACCAATTTGGTAATATTCAGATTGTC
CGTAAGAACATCCCTGAAAATATCTATCAAGAATTATATAAATATTTCAACGATAAGTCGGACAAGGAACTTAGCGATGAAGCC
GCGAAGTTGAAAAATGTTGTTGGTCACCACGAAGCAGCAACAAACATTGTGAAAGACTATCGCTACACTTACGATAAGTACTTT
TTACATATGCCTATTACGATTAACTTTAAGGCAAATAAGACAGGTTTTATCAACGACCGTATCCTGCAATATATTGCAAAAGAG
AAGGACCTGCATGTCATTGGGATTGATCGCGGTGAACGCAATCTGATTTACGTGAGTGTTATTGATACCTGCGGTAATATTGTT
GAGCAAAAGTCTTTTAATATCGTTAATGGTTACGACTACCAAATTAAGCTTAAACAACAGGAAGGTGCCCGCCAGATCGCCCGT
AAGGAGTGGAAGGAAATCGGAAAAATTAAGGAAATCAAAGAGGGATATCTGAGCTTGGTTATTCATGAAATCTCAAAGATGGTT
ATTAAGTACAACGCCATCATCGCTATGGAAGACTTATCGTATGGGTTTAAAAAGGGTCGTTTCAAAGTTGAGCGCCAGGTCTAC
CAAAAGTTTGAAACGATGCTTATTAATAAATTAAACTACTTGGTTTTCAAAGATATCTCTATTACCGAGAATGGAGGTTTACTG
AAAGGATACCAGTTAACGTATATCCCCGATAAGCTTAAAAACGTGGGCCATCAGTGTGGCTGTATTTTCTATGTGCCCGCGGCA
TATACATCAAAAATTGACCCGACGACGGGTTTCGTTAATATCTTCAAGTTCAAAGATCTGACAGTTGATGCAAAACGCGAATTC
ATTAAGAAGTTCGATAGTATTCGCTATGACTCCGAGAAAAATTTGTTTTGCTTCACTTTTGACTACAATAACTTTATTACTCAG
AATACAGTCATGAGTAAAAGCTCCTGGTCGGTTTACACGTACGGGGTACGCATCAAACGTCGTTTTGTGAATGGTCGTTTTAGT
AATGAGTCGGATACAATTGATATTACCAAGGATATGGAGAAGACTCTGGAAATGACAGACATCAATTGGCGTGATGGACATGAT
TTGCGTCAGGACATTATCGACTATGAGATTGTGCAGCATATTTTCGAAATTTTTCGCCTGACGGTGCAAATGCGTAATTCCTTA
AGCGAACTGGAAGATCGCGACTATGACCGCTTAATTTCTCCTGTGCTGAATGAGAACAACATCTTCTATGACTCAGCGAAAGCC
GGGGACGCTTTGCCAAAGGATGCAGATGCTAACGGTGCATATTGTATTGCTCTGAAAGGCCTTTACGAGATCAAACAAATTACT
GAAAACTGGAAGGAAGATGGAAAGTTTTCCCGTGATAAATTGAAGATCTCTAATAAGGACTGGTTTGACTTTATCCAAAATAAA
CGTTATTTA
ErCas12a-D59R-AA (SEQ ID NO: 18)
MNNGTNNFQNFIGISSLQKTLRNALIPTETTQQFIVKNGIIKEDELRGENRQILKDIMRDYYRGFISETLSSIDDIDWTSLFEK
MEIQLKNGDNKDTLIKEQTEYRKAIHKKFANDDRFKNMFSAKLISDILPEFVIHNNNYSASEKEEKTQVIKLESRFATSFKDYF
KNRANCFSADDISSSSCHRIVNDNAEIFFSNALVYRRIVKSLSNDDINKISGDMKDSLKEMSLEEIYSYEKYGEFITQEGISFY
NDICGKVNSFMNLYCQKNKENKNLYKLQKLHKQILCIADTSYEVPYKFESDEEVYQSVNGELDNISSKHIVERLRKIGDNYNGY
NLDKIYIVSKFYESVSQKTYRDWETINTALEIHYNNILPGNGKSKADKVKKAVKNDLQKSITEINELVSNYKLCSDDNIKAETY
IHEISHILNNFEAQELKYNPEIHLVESELKASELKNVLDVIMNAFHWCSVFMTEELVDKDNNFYAELEEIYDEIYPVISLYNLV
RNYVTQKPYSTKKIKLNFGIPTLADGWSKSKEYSNNAIILMRDNLYYLGIFNAKNKPDKKIIEGNTSENKGDYKKMIYNLLPGP
NKMIPKVFLSSKTGVETYKPSAYILEGYKQNKHIKSSKDFDITFCHDLIDYFKNCIAIHPEWKNFGFDFSDTSTYEDISGFYRE
VELQGYKIDWTYISEKDIDLLQEKGQLYLFQIYNKDFSKKSTGNDNLHTMYLKNLFSEENLKDIVLKLNGEAEIFFRKSSIKNP
IIHKKGSILVNRTYEAEEKDQFGNIQIVRKNIPENIYQELYKYFNDKSDKELSDEAAKLKNVVGHHEAATNIVKDYRYTYDKYF
LHMPITINFKANKTGFINDRILQYIAKEKDLHVIGIDRGERNLIYVSVIDTCGNIVEQKSFNIVNGYDYQIKLKQQEGARQIAR
KEWKEIGKIKEIKEGYLSLVIHEISKMVIKYNAIIAMEDLSYGFKKGRFKVERQVYQKFETMLINKLNYLVFKDISITENGGLL
KGYQLTYIPDKLKNVGHQCGCIFYVPAAYTSKIDPTTGFVNIFKFKDLTVDAKREFIKKFDSIRYDSEKNLFCFTEDYNNFITQ
NTVMSKSSWSVYTYGVRIKRRFVNGRFSNESDTIDITKDMEKTLEMTDINWRDGHDLRQDIIDYEIVQHIFEIFRLTVQMRNSL
SELEDRDYDRLISPVLNENNIFYDSAKAGDALPKDADANGAYCIALKGLYEIKQITENWKEDGKFSRDKLKISNKDWFDFIQNK
RYL
ErCas12a-D59A-NT (SEQ ID NO: 19)
atgAATAACGGTACCAATAACTTTCAAAATTTTATCGGGATCTCCTCGTTGCAAAAAACTCTTCGTAATGCTTTAATCCCGACT
GAGACAACACAGCAGTTCATCGTTAAAAACGGCATCATTAAAGAAGATGAGCTGCGCGGCGAGAACCGTCAGATTTTAAAGGAC
ATCATGGCGGACTATTACCGTGGGTTCATCTCAGAAACATTAAGCAGCATCGATGATATCGACTGGACCTCACTGTTTGAGAAG
ATGGAGATTCAACTTAAGAATGGAGACAACAAAGACACTTTAATTAAGGAGCAGACGGAATATCGTAAAGCTATCCATAAAAAA
TTTGCAAACGATGACCGTTTCAAAAATATGTTTTCCGCAAAATTGATTAGCGACATTTTACCTGAATTCGTAATCCATAACAAC
AACTATTCCGCATCTGAAAAAGAGGAGAAGACCCAAGTTATCAAACTTTTTTCACGTTTCGCGACATCTTTTAAAGACTACTTT
AAGAATCGTGCGAATTGTTTCAGTGCAGATGATATTTCGTCTAGTTCATGTCACCGTATCGTGAATGACAACGCTGAGATTTTC
TTTTCTAATGCGTTGGTGTATCGCCGCATCGTAAAGTCCTTGTCGAATGATGATATCAACAAAATTAGTGGTGACATGAAAGAC
TCCCTGAAAGAAATGTCATTAGAGGAGATTTACAGCTACGAAAAATACGGAGAGTTCATCACTCAGGAAGGTATCTCCTTTTAC
AACGATATTTGCGGCAAAGTTAATAGTTTCATGAATCTGTATTGTCAGAAGAATAAGGAAAACAAGAATCTGTACAAGTTACAA
AAGCTTCATAAACAGATCTTGTGCATCGCCGACACGTCTTATGAAGTCCCGTATAAATTTGAAAGCGACGAAGAAGTATATCAG
AGTGTGAATGGATTCTTGGACAATATCTCATCAAAACACATTGTTGAACGTTTGCGCAAAATCGGCGACAACTATAACGGATAC
AACTTGGATAAAATTTATATCGTATCAAAATTTTATGAATCAGTATCCCAAAAGACTTACCGTGATTGGGAGACTATTAATACG
GCGTTAGAAATCCATTACAACAACATTCTGCCGGGTAACGGTAAATCGAAAGCGGACAAAGTGAAGAAGGCGGTTAAGAACGAT
CTTCAGAAGTCTATCACGGAGATTAATGAGCTGGTTTCCAATTACAAGTTGTGCTCGGATGATAACATCAAAGCTGAAACCTAT
ATCCATGAAATTTCTCATATTCTTAATAACTTCGAGGCACAAGAATTAAAATATAACCCAGAAATTCATCTGGTTGAGAGCGAA
CTTAAAGCTTCAGAATTAAAAAATGTTTTGGACGTAATTATGAACGCCTTCCATTGGTGCAGCGTGTTTATGACAGAGGAGTTA
GTAGATAAGGATAACAACTTTTATGCAGAATTGGAAGAGATCTATGATGAGATCTATCCAGTGATTTCACTGTATAACTTAGTC
CGTAATTACGTCACTCAGAAGCCGTACTCAACTAAAAAGATCAAGTTAAATTTTGGAATTCCGACATTGGCGGATGGTTGGAGT
AAGTCTAAGGAATACTCAAATAACGCTATTATCTTAATGCGTGACAACCTGTATTACTTGGGTATTTTCAATGCCAAAAATAAG
CCCGATAAAAAAATCATTGAAGGGAATACTTCAGAAAATAAGGGAGATTACAAAAAAATGATTTATAACCTTTTGCCAGGCCCA
AACAAAATGATCCCCAAGGTGTTTTTGAGTAGTAAGACGGGAGTAGAAACATATAAGCCATCAGCGTACATTCTTGAAGGGTAC
AAACAAAATAAACACATCAAGAGCAGCAAGGACTTTGACATTACATTTTGTCATGACTTAATCGACTACTTTAAAAATTGCATT
GCCATTCACCCTGAGTGGAAAAATTTTGGTTTCGACTTCAGTGATACCTCTACCTATGAAGATATCTCTGGTTTTTATCGTGAG
GTAGAACTTCAGGGTTACAAGATCGATTGGACGTACATTTCCGAGAAAGACATTGATCTTTTACAAGAGAAGGGTCAGCTTTAC
TTATTTCAGATCTACAATAAAGACTTTTCGAAAAAATCCACGGGCAACGACAACCTTCATACAATGTACTTAAAGAACCTGTTC
TCTGAAGAAAACTTGAAAGATATCGTGCTTAAATTGAATGGCGAGGCCGAGATTTTTTTCCGTAAAAGCTCGATTAAGAATCCC
ATCATCCACAAGAAAGGCAGCATTCTGGTAAATCGTACCTATGAAGCGGAGGAAAAGGACCAATTTGGTAATATTCAGATTGTC
CGTAAGAACATCCCTGAAAATATCTATCAAGAATTATATAAATATTTCAACGATAAGTCGGACAAGGAACTTAGCGATGAAGCC
GCGAAGTTGAAAAATGTTGTTGGTCACCACGAAGCAGCAACAAACATTGTGAAAGACTATCGCTACACTTACGATAAGTACTTT
TTACATATGCCTATTACGATTAACTTTAAGGCAAATAAGACAGGTTTTATCAACGACCGTATCCTGCAATATATTGCAAAAGAG
AAGGACCTGCATGTCATTGGGATTGATCGCGGTGAACGCAATCTGATTTACGTGAGTGTTATTGATACCTGCGGTAATATTGTT
GAGCAAAAGTCTTTTAATATCGTTAATGGTTACGACTACCAAATTAAGCTTAAACAACAGGAAGGTGCCCGCCAGATCGCCCGT
AAGGAGTGGAAGGAAATCGGAAAAATTAAGGAAATCAAAGAGGGATATCTGAGCTTGGTTATTCATGAAATCTCAAAGATGGTT
ATTAAGTACAACGCCATCATCGCTATGGAAGACTTATCGTATGGGTTTAAAAAGGGTCGTTTCAAAGTTGAGCGCCAGGTCTAC
CAAAAGTTTGAAACGATGCTTATTAATAAATTAAACTACTTGGTTTTCAAAGATATCTCTATTACCGAGAATGGAGGTTTACTG
AAAGGATACCAGTTAACGTATATCCCCGATAAGCTTAAAAACGTGGGCCATCAGTGTGGCTGTATTTTCTATGTGCCCGCGGCA
TATACATCAAAAATTGACCCGACGACGGGTTTCGTTAATATCTTCAAGTTCAAAGATCTGACAGTTGATGCAAAACGCGAATTC
ATTAAGAAGTTCGATAGTATTCGCTATGACTCCGAGAAAAATTTGTTTTGCTTCACTTTTGACTACAATAACTTTATTACTCAG
AATACAGTCATGAGTAAAAGCTCCTGGTCGGTTTACACGTACGGGGTACGCATCAAACGTCGTTTTGTGAATGGTCGTTTTAGT
AATGAGTCGGATACAATTGATATTACCAAGGATATGGAGAAGACTCTGGAAATGACAGACATCAATTGGCGTGATGGACATGAT
TTGCGTCAGGACATTATCGACTATGAGATTGTGCAGCATATTTTCGAAATTTTTCGCCTGACGGTGCAAATGCGTAATTCCTTA
AGCGAACTGGAAGATCGCGACTATGACCGCTTAATTTCTCCTGTGCTGAATGAGAACAACATCTTCTATGACTCAGCGAAAGCC
GGGGACGCTTTGCCAAAGGATGCAGATGCTAACGGTGCATATTGTATTGCTCTGAAAGGCCTTTACGAGATCAAACAAATTACT
GAAAACTGGAAGGAAGATGGAAAGTTTTCCCGTGATAAATTGAAGATCTCTAATAAGGACTGGTTTGACTTTATCCAAAATAAA
CGTTATTTA
ErCas12a-D59A-AA (SEQ ID NO: 20)
MNNGTNNFQNFIGISSLQKTLRNALIPTETTQQFIVKNGIIKEDELRGENRQILKDIMADYYRGFISETLSSIDDIDWTSLFEK
MEIQLKNGDNKDTLIKEQTEYRKAIHKKFANDDRFKNMFSAKLISDILPEFVIHNNNYSASEKEEKTQVIKLFSRFATSFKDYF
KNRANCFSADDISSSSCHRIVNDNAEIFFSNALVYRRIVKSLSNDDINKISGDMKDSLKEMSLEEIYSYEKYGEFITQEGISFY
NDICGKVNSFMNLYCQKNKENKNLYKLQKLHKQILCIADTSYEVPYKFESDEEVYQSVNGELDNISSKHIVERLRKIGDNYNGY
NLDKIYIVSKFYESVSQKTYRDWETINTALEIHYNNILPGNGKSKADKVKKAVKNDLQKSITEINELVSNYKLCSDDNIKAETY
IHEISHILNNFEAQELKYNPEIHLVESELKASELKNVLDVIMNAFHWCSVFMTEELVDKDNNFYAELEEIYDEIYPVISLYNLV
RNYVTQKPYSTKKIKLNFGIPTLADGWSKSKEYSNNAIILMRDNLYYLGIFNAKNKPDKKIIEGNTSENKGDYKKMIYNLLPGP
NKMIPKVFLSSKTGVETYKPSAYILEGYKQNKHIKSSKDFDITFCHDLIDYFKNCIAIHPEWKNFGFDFSDTSTYEDISGFYRE
VELQGYKIDWTYISEKDIDLLQEKGQLYLFQIYNKDFSKKSTGNDNLHTMYLKNLFSEENLKDIVLKLNGEAEIFFRKSSIKNP
IIHKKGSILVNRTYEAEEKDQFGNIQIVRKNIPENIYQELYKYFNDKSDKELSDEAAKLKNVVGHHEAATNIVKDYRYTYDKYF
LHMPITINFKANKTGFINDRILQYIAKEKDLHVIGIDRGERNLIYVSVIDTCGNIVEQKSFNIVNGYDYQIKLKQQEGARQIAR
KEWKEIGKIKEIKEGYLSLVIHEISKMVIKYNAIIAMEDLSYGFKKGRFKVERQVYQKFETMLINKLNYLVFKDISITENGGLL
KGYQLTYIPDKLKNVGHQCGCIFYVPAAYTSKIDPTTGFVNIFKFKDLTVDAKREFIKKFDSIRYDSEKNLFCFTEDYNNFITQ
NTVMSKSSWSVYTYGVRIKRRFVNGRFSNESDTIDITKDMEKTLEMTDINWRDGHDLRQDIIDYEIVQHIFEIFRLTVQMRNSL
SELEDRDYDRLISPVLNENNIFYDSAKAGDALPKDADANGAYCIALKGLYEIKQITENWKEDGKFSRDKLKISNKDWEDFIQNK
RYL
ErCas12a-S158G-NT (SEQ ID NO: 21)
atgAATAACGGTACCAATAACTTTCAAAATTTTATCGGGATCTCCTCGTTGCAAAAAACTCTTCGTAATGCTTTAATCCCGACT
GAGACAACACAGCAGTTCATCGTTAAAAACGGCATCATTAAAGAAGATGAGCTGCGCGGCGAGAACCGTCAGATTTTAAAGGAC
ATCATGGACGACTATTACCGTGGGTTCATCTCAGAAACATTAAGCAGCATCGATGATATCGACTGGACCTCACTGTTTGAGAAG
ATGGAGATTCAACTTAAGAATGGAGACAACAAAGACACTTTAATTAAGGAGCAGACGGAATATCGTAAAGCTATCCATAAAAAA
TTTGCAAACGATGACCGTTTCAAAAATATGTTTTCCGCAAAATTGATTAGCGACATTTTACCTGAATTCGTAATCCATAACAAC
AACTATTCCGCATCTGAAAAAGAGGAGAAGACCCAAGTTATCAAACTTTTTGGCCGTTTCGCGACATCTTTTAAAGACTACTTT
AAGAATCGTGCGAATTGTTTCAGTGCAGATGATATTTCGTCTAGTTCATGTCACCGTATCGTGAATGACAACGCTGAGATTTTC
TTTTCTAATGCGTTGGTGTATCGCCGCATCGTAAAGTCCTTGTCGAATGATGATATCAACAAAATTAGTGGTGACATGAAAGAC
TCCCTGAAAGAAATGTCATTAGAGGAGATTTACAGCTACGAAAAATACGGAGAGTTCATCACTCAGGAAGGTATCTCCTTTTAC
AACGATATTTGCGGCAAAGTTAATAGTTTCATGAATCTGTATTGTCAGAAGAATAAGGAAAACAAGAATCTGTACAAGTTACAA
AAGCTTCATAAACAGATCTTGTGCATCGCCGACACGTCTTATGAAGTCCCGTATAAATTTGAAAGCGACGAAGAAGTATATCAG
AGTGTGAATGGATTCTTGGACAATATCTCATCAAAACACATTGTTGAACGTTTGCGCAAAATCGGCGACAACTATAACGGATAC
AACTTGGATAAAATTTATATCGTATCAAAATTTTATGAATCAGTATCCCAAAAGACTTACCGTGATTGGGAGACTATTAATACG
GCGTTAGAAATCCATTACAACAACATTCTGCCGGGTAACGGTAAATCGAAAGCGGACAAAGTGAAGAAGGCGGTTAAGAACGAT
CTTCAGAAGTCTATCACGGAGATTAATGAGCTGGTTTCCAATTACAAGTTGTGCTCGGATGATAACATCAAAGCTGAAACCTAT
ATCCATGAAATTTCTCATATTCTTAATAACTTCGAGGCACAAGAATTAAAATATAACCCAGAAATTCATCTGGTTGAGAGCGAA
CTTAAAGCTTCAGAATTAAAAAATGTTTTGGACGTAATTATGAACGCCTTCCATTGGTGCAGCGTGTTTATGACAGAGGAGTTA
GTAGATAAGGATAACAACTTTTATGCAGAATTGGAAGAGATCTATGATGAGATCTATCCAGTGATTTCACTGTATAACTTAGTC
CGTAATTACGTCACTCAGAAGCCGTACTCAACTAAAAAGATCAAGTTAAATTTTGGAATTCCGACATTGGCGGATGGTTGGAGT
AAGTCTAAGGAATACTCAAATAACGCTATTATCTTAATGCGTGACAACCTGTATTACTTGGGTATTTTCAATGCCAAAAATAAG
CCCGATAAAAAAATCATTGAAGGGAATACTTCAGAAAATAAGGGAGATTACAAAAAAATGATTTATAACCTTTTGCCAGGCCCA
AACAAAATGATCCCCAAGGTGTTTTTGAGTAGTAAGACGGGAGTAGAAACATATAAGCCATCAGCGTACATTCTTGAAGGGTAC
AAACAAAATAAACACATCAAGAGCAGCAAGGACTTTGACATTACATTTTGTCATGACTTAATCGACTACTTTAAAAATTGCATT
GCCATTCACCCTGAGTGGAAAAATTTTGGTTTCGACTTCAGTGATACCTCTACCTATGAAGATATCTCTGGTTTTTATCGTGAG
GTAGAACTTCAGGGTTACAAGATCGATTGGACGTACATTTCCGAGAAAGACATTGATCTTTTACAAGAGAAGGGTCAGCTTTAC
TTATTTCAGATCTACAATAAAGACTTTTCGAAAAAATCCACGGGCAACGACAACCTTCATACAATGTACTTAAAGAACCTGTTC
TCTGAAGAAAACTTGAAAGATATCGTGCTTAAATTGAATGGCGAGGCCGAGATTTTTTTCCGTAAAAGCTCGATTAAGAATCCC
ATCATCCACAAGAAAGGCAGCATTCTGGTAAATCGTACCTATGAAGCGGAGGAAAAGGACCAATTTGGTAATATTCAGATTGTC
CGTAAGAACATCCCTGAAAATATCTATCAAGAATTATATAAATATTTCAACGATAAGTCGGACAAGGAACTTAGCGATGAAGCC
GCGAAGTTGAAAAATGTTGTTGGTCACCACGAAGCAGCAACAAACATTGTGAAAGACTATCGCTACACTTACGATAAGTACTTT
TTACATATGCCTATTACGATTAACTTTAAGGCAAATAAGACAGGTTTTATCAACGACCGTATCCTGCAATATATTGCAAAAGAG
AAGGACCTGCATGTCATTGGGATTGATCGCGGTGAACGCAATCTGATTTACGTGAGTGTTATTGATACCTGCGGTAATATTGTT
GAGCAAAAGTCTTTTAATATCGTTAATGGTTACGACTACCAAATTAAGCTTAAACAACAGGAAGGTGCCCGCCAGATCGCCCGT
AAGGAGTGGAAGGAAATCGGAAAAATTAAGGAAATCAAAGAGGGATATCTGAGCTTGGTTATTCATGAAATCTCAAAGATGGTT
ATTAAGTACAACGCCATCATCGCTATGGAAGACTTATCGTATGGGTTTAAAAAGGGTCGTTTCAAAGTTGAGCGCCAGGTCTAC
CAAAAGTTTGAAACGATGCTTATTAATAAATTAAACTACTTGGTTTTCAAAGATATCTCTATTACCGAGAATGGAGGTTTACTG
AAAGGATACCAGTTAACGTATATCCCCGATAAGCTTAAAAACGTGGGCCATCAGTGTGGCTGTATTTTCTATGTGCCCGCGGCA
TATACATCAAAAATTGACCCGACGACGGGTTTCGTTAATATCTTCAAGTTCAAAGATCTGACAGTTGATGCAAAACGCGAATTC
ATTAAGAAGTTCGATAGTATTCGCTATGACTCCGAGAAAAATTTGTTTTGCTTCACTTTTGACTACAATAACTTTATTACTCAG
AATACAGTCATGAGTAAAAGCTCCTGGTCGGTTTACACGTACGGGGTACGCATCAAACGTCGTTTTGTGAATGGTCGTTTTAGT
AATGAGTCGGATACAATTGATATTACCAAGGATATGGAGAAGACTCTGGAAATGACAGACATCAATTGGCGTGATGGACATGAT
TTGCGTCAGGACATTATCGACTATGAGATTGTGCAGCATATTTTCGAAATTTTTCGCCTGACGGTGCAAATGCGTAATTCCTTA
AGCGAACTGGAAGATCGCGACTATGACCGCTTAATTTCTCCTGTGCTGAATGAGAACAACATCTTCTATGACTCAGCGAAAGCC
GGGGACGCTTTGCCAAAGGATGCAGATGCTAACGGTGCATATTGTATTGCTCTGAAAGGCCTTTACGAGATCAAACAAATTACT
GAAAACTGGAAGGAAGATGGAAAGTTTTCCCGTGATAAATTGAAGATCTCTAATAAGGACTGGTTTGACTTTATCCAAAATAAA
CGTTATTTA
ErCas12a-S158G-AA (SEQ ID NO: 22)
MNNGTNNFQNFIGISSLQKTLRNALIPTETTQQFIVKNGIIKEDELRGENRQILKDIMDDYYRGFISETLSSIDDIDWTSLFEK
MEIQLKNGDNKDTLIKEQTEYRKAIHKKFANDDRFKNMFSAKLISDILPEFVIHNNNYSASEKEEKTQVIKLFGRFATSFKDYF
KNRANCFSADDISSSSCHRIVNDNAEIFFSNALVYRRIVKSLSNDDINKISGDMKDSLKEMSLEEIYSYEKYGEFITQEGISFY
NDICGKVNSFMNLYCQKNKENKNLYKLQKLHKQILCIADTSYEVPYKFESDEEVYQSVNGFLDNISSKHIVERLRKIGDNYNGY
NLDKIYIVSKFYESVSQKTYRDWETINTALEIHYNNILPGNGKSKADKVKKAVKNDLQKSITEINELVSNYKLCSDDNIKAETY
IHEISHILNNFEAQELKYNPEIHLVESELKASELKNVLDVIMNAFHWCSVFMTEELVDKDNNFYAELEEIYDEIYPVISLYNLV
RNYVTQKPYSTKKIKLNFGIPTLADGWSKSKEYSNNAIILMRDNLYYLGIFNAKNKPDKKIIEGNTSENKGDYKKMIYNLLPGP
NKMIPKVFLSSKTGVETYKPSAYILEGYKQNKHIKSSKDFDITFCHDLIDYFKNCIAIHPEWKNFGFDESDTSTYEDISGFYRE
VELQGYKIDWTYISEKDIDLLQEKGQLYLFQIYNKDFSKKSTGNDNLHTMYLKNLFSEENLKDIVLKLNGEAEIFFRKSSIKNP
IIHKKGSILVNRTYEAEEKDQFGNIQIVRKNIPENIYQELYKYFNDKSDKELSDEAAKLKNVVGHHEAATNIVKDYRYTYDKYF
LHMPITINFKANKTGFINDRILQYIAKEKDLHVIGIDRGERNLIYVSVIDTCGNIVEQKSFNIVNGYDYQIKLKQQEGARQIAR
KEWKEIGKIKEIKEGYLSLVIHEISKMVIKYNAIIAMEDLSYGFKKGRFKVERQVYQKFETMLINKLNYLVFKDISITENGGLL
KGYQLTYIPDKLKNVGHQCGCIFYVPAAYTSKIDPTTGFVNIFKFKDLTVDAKREFIKKFDSIRYDSEKNLFCFTFDYNNFITQ
NTVMSKSSWSVYTYGVRIKRRFVNGRFSNESDTIDITKDMEKTLEMTDINWRDGHDLRQDIIDYEIVQHIFEIFRLTVQMRNSL
SELEDRDYDRLISPVLNENNIFYDSAKAGDALPKDADANGAYCIALKGLYEIKQITENWKEDGKFSRDKLKISNKDWFDFIQNK
RYL
ErCas12a-K165Y-NT (SEQ ID NO: 23)
atgAATAACGGTACCAATAACTTTCAAAATTTTATCGGGATCTCCTCGTTGCAAAAAACTCTTCGTAATGCTTTAATCCCGACT
GAGACAACACAGCAGTTCATCGTTAAAAACGGCATCATTAAAGAAGATGAGCTGCGCGGCGAGAACCGTCAGATTTTAAAGGAC
ATCATGGACGACTATTACCGTGGGTTCATCTCAGAAACATTAAGCAGCATCGATGATATCGACTGGACCTCACTGTTTGAGAAG
ATGGAGATTCAACTTAAGAATGGAGACAACAAAGACACTTTAATTAAGGAGCAGACGGAATATCGTAAAGCTATCCATAAAAAA
TTTGCAAACGATGACCGTTTCAAAAATATGTTTTCCGCAAAATTGATTAGCGACATTTTACCTGAATTCGTAATCCATAACAAC
AACTATTCCGCATCTGAAAAAGAGGAGAAGACCCAAGTTATCAAACTTTTTTCACGTTTCGCGACATCTTTTTATGACTACTTT
AAGAATCGTGCGAATTGTTTCAGTGCAGATGATATTTCGTCTAGTTCATGTCACCGTATCGTGAATGACAACGCTGAGATTTTC
TTTTCTAATGCGTTGGTGTATCGCCGCATCGTAAAGTCCTTGTCGAATGATGATATCAACAAAATTAGTGGTGACATGAAAGAC
TCCCTGAAAGAAATGTCATTAGAGGAGATTTACAGCTACGAAAAATACGGAGAGTTCATCACTCAGGAAGGTATCTCCTTTTAC
AACGATATTTGCGGCAAAGTTAATAGTTTCATGAATCTGTATTGTCAGAAGAATAAGGAAAACAAGAATCTGTACAAGTTACAA
AAGCTTCATAAACAGATCTTGTGCATCGCCGACACGTCTTATGAAGTCCCGTATAAATTTGAAAGCGACGAAGAAGTATATCAG
AGTGTGAATGGATTCTTGGACAATATCTCATCAAAACACATTGTTGAACGTTTGCGCAAAATCGGCGACAACTATAACGGATAC
AACTTGGATAAAATTTATATCGTATCAAAATTTTATGAATCAGTATCCCAAAAGACTTACCGTGATTGGGAGACTATTAATACG
GCGTTAGAAATCCATTACAACAACATTCTGCCGGGTAACGGTAAATCGAAAGCGGACAAAGTGAAGAAGGCGGTTAAGAACGAT
CTTCAGAAGTCTATCACGGAGATTAATGAGCTGGTTTCCAATTACAAGTTGTGCTCGGATGATAACATCAAAGCTGAAACCTAT
ATCCATGAAATTTCTCATATTCTTAATAACTTCGAGGCACAAGAATTAAAATATAACCCAGAAATTCATCTGGTTGAGAGCGAA
CTTAAAGCTTCAGAATTAAAAAATGTTTTGGACGTAATTATGAACGCCTTCCATTGGTGCAGCGTGTTTATGACAGAGGAGTTA
GTAGATAAGGATAACAACTTTTATGCAGAATTGGAAGAGATCTATGATGAGATCTATCCAGTGATTTCACTGTATAACTTAGTC
CGTAATTACGTCACTCAGAAGCCGTACTCAACTAAAAAGATCAAGTTAAATTTTGGAATTCCGACATTGGCGGATGGTTGGAGT
AAGTCTAAGGAATACTCAAATAACGCTATTATCTTAATGCGTGACAACCTGTATTACTTGGGTATTTTCAATGCCAAAAATAAG
CCCGATAAAAAAATCATTGAAGGGAATACTTCAGAAAATAAGGGAGATTACAAAAAAATGATTTATAACCTTTTGCCAGGCCCA
AACAAAATGATCCCCAAGGTGTTTTTGAGTAGTAAGACGGGAGTAGAAACATATAAGCCATCAGCGTACATTCTTGAAGGGTAC
AAACAAAATAAACACATCAAGAGCAGCAAGGACTTTGACATTACATTTTGTCATGACTTAATCGACTACTTTAAAAATTGCATT
GCCATTCACCCTGAGTGGAAAAATTTTGGTTTCGACTTCAGTGATACCTCTACCTATGAAGATATCTCTGGTTTTTATCGTGAG
GTAGAACTTCAGGGTTACAAGATCGATTGGACGTACATTTCCGAGAAAGACATTGATCTTTTACAAGAGAAGGGTCAGCTTTAC
TTATTTCAGATCTACAATAAAGACTTTTCGAAAAAATCCACGGGCAACGACAACCTTCATACAATGTACTTAAAGAACCTGTTC
TCTGAAGAAAACTTGAAAGATATCGTGCTTAAATTGAATGGCGAGGCCGAGATTTTTTTCCGTAAAAGCTCGATTAAGAATCCC
ATCATCCACAAGAAAGGCAGCATTCTGGTAAATCGTACCTATGAAGCGGAGGAAAAGGACCAATTTGGTAATATTCAGATTGTC
CGTAAGAACATCCCTGAAAATATCTATCAAGAATTATATAAATATTTCAACGATAAGTCGGACAAGGAACTTAGCGATGAAGCC
GCGAAGTTGAAAAATGTTGTTGGTCACCACGAAGCAGCAACAAACATTGTGAAAGACTATCGCTACACTTACGATAAGTACTTT
TTACATATGCCTATTACGATTAACTTTAAGGCAAATAAGACAGGTTTTATCAACGACCGTATCCTGCAATATATTGCAAAAGAG
AAGGACCTGCATGTCATTGGGATTGATCGCGGTGAACGCAATCTGATTTACGTGAGTGTTATTGATACCTGCGGTAATATTGTT
GAGCAAAAGTCTTTTAATATCGTTAATGGTTACGACTACCAAATTAAGCTTAAACAACAGGAAGGTGCCCGCCAGATCGCCCGT
AAGGAGTGGAAGGAAATCGGAAAAATTAAGGAAATCAAAGAGGGATATCTGAGCTTGGTTATTCATGAAATCTCAAAGATGGTT
ATTAAGTACAACGCCATCATCGCTATGGAAGACTTATCGTATGGGTTTAAAAAGGGTCGTTTCAAAGTTGAGCGCCAGGTCTAC
CAAAAGTTTGAAACGATGCTTATTAATAAATTAAACTACTTGGTTTTCAAAGATATCTCTATTACCGAGAATGGAGGTTTACTG
AAAGGATACCAGTTAACGTATATCCCCGATAAGCTTAAAAACGTGGGCCATCAGTGTGGCTGTATTTTCTATGTGCCCGCGGCA
TATACATCAAAAATTGACCCGACGACGGGTTTCGTTAATATCTTCAAGTTCAAAGATCTGACAGTTGATGCAAAACGCGAATTC
ATTAAGAAGTTCGATAGTATTCGCTATGACTCCGAGAAAAATTTGTTTTGCTTCACTTTTGACTACAATAACTTTATTACTCAG
AATACAGTCATGAGTAAAAGCTCCTGGTCGGTTTACACGTACGGGGTACGCATCAAACGTCGTTTTGTGAATGGTCGTTTTAGT
AATGAGTCGGATACAATTGATATTACCAAGGATATGGAGAAGACTCTGGAAATGACAGACATCAATTGGCGTGATGGACATGAT
TTGCGTCAGGACATTATCGACTATGAGATTGTGCAGCATATTTTCGAAATTTTTCGCCTGACGGTGCAAATGCGTAATTCCTTA
AGCGAACTGGAAGATCGCGACTATGACCGCTTAATTTCTCCTGTGCTGAATGAGAACAACATCTTCTATGACTCAGCGAAAGCC
GGGGACGCTTTGCCAAAGGATGCAGATGCTAACGGTGCATATTGTATTGCTCTGAAAGGCCTTTACGAGATCAAACAAATTACT
GAAAACTGGAAGGAAGATGGAAAGTTTTCCCGTGATAAATTGAAGATCTCTAATAAGGACTGGTTTGACTTTATCCAAAATAAA
CGTTATTTA
ErCas12a-K165Y-AA (SEQ ID NO: 24)
MNNGTNNFQNFIGISSLQKTLRNALIPTETTQQFIVKNGIIKEDELRGENRQILKDIMDDYYRGFISETLSSIDDIDWTSLFEK
MEIQLKNGDNKDTLIKEQTEYRKAIHKKFANDDRFKNMFSAKLISDILPEFVIHNNNYSASEKEEKTQVIKLFSRFATSFYDYF
KNRANCFSADDISSSSCHRIVNDNAEIFFSNALVYRRIVKSLSNDDINKISGDMKDSLKEMSLEEIYSYEKYGEFITQEGISFY
NDICGKVNSFMNLYCQKNKENKNLYKLQKLHKQILCIADTSYEVPYKFESDEEVYQSVNGELDNISSKHIVERLRKIGDNYNGY
NLDKIYIVSKFYESVSQKTYRDWETINTALEIHYNNILPGNGKSKADKVKKAVKNDLQKSITEINELVSNYKLCSDDNIKAETY
IHEISHILNNFEAQELKYNPEIHLVESELKASELKNVLDVIMNAFHWCSVFMTEELVDKDNNFYAELEEIYDEIYPVISLYNLV
RNYVTQKPYSTKKIKLNFGIPTLADGWSKSKEYSNNAIILMRDNLYYLGIFNAKNKPDKKIIEGNTSENKGDYKKMIYNLLPGP
NKMIPKVFLSSKTGVETYKPSAYILEGYKQNKHIKSSKDFDITFCHDLIDYFKNCIAIHPEWKNFGFDFSDTSTYEDISGFYRE
VELQGYKIDWTYISEKDIDLLQEKGQLYLFQIYNKDFSKKSTGNDNLHTMYLKNLFSEENLKDIVLKLNGEAEIFFRKSSIKNP
IIHKKGSILVNRTYEAEEKDQFGNIQIVRKNIPENIYQELYKYFNDKSDKELSDEAAKLKNVVGHHEAATNIVKDYRYTYDKYF
LHMPITINFKANKTGFINDRILQYIAKEKDLHVIGIDRGERNLIYVSVIDTCGNIVEQKSFNIVNGYDYQIKLKQQEGARQIAR
KEWKEIGKIKEIKEGYLSLVIHEISKMVIKYNAIIAMEDLSYGFKKGRFKVERQVYQKFETMLINKLNYLVFKDISITENGGLL
KGYQLTYIPDKLKNVGHQCGCIFYVPAAYTSKIDPTTGFVNIFKFKDLTVDAKREFIKKFDSIRYDSEKNLFCFTEDYNNFITQ
NTVMSKSSWSVYTYGVRIKRRFVNGRFSNESDTIDITKDMEKTLEMTDINWRDGHDLRQDIIDYEIVQHIFEIFRLTVQMRNSL
SELEDRDYDRLISPVLNENNIFYDSAKAGDALPKDADANGAYCIALKGLYEIKQITENWKEDGKFSRDKLKISNKDWFDFIQNK
RYL
ErCas12a-S181V-NT (SEQ ID NO: 25)
atgAATAACGGTACCAATAACTTTCAAAATTTTATCGGGATCTCCTCGTTGCAAAAAACTCTTCGTAATGCTTTAATCCCGACT
GAGACAACACAGCAGTTCATCGTTAAAAACGGCATCATTAAAGAAGATGAGCTGCGCGGCGAGAACCGTCAGATTTTAAAGGAC
ATCATGGACGACTATTACCGTGGGTTCATCTCAGAAACATTAAGCAGCATCGATGATATCGACTGGACCTCACTGTTTGAGAAG
ATGGAGATTCAACTTAAGAATGGAGACAACAAAGACACTTTAATTAAGGAGCAGACGGAATATCGTAAAGCTATCCATAAAAAA
TTTGCAAACGATGACCGTTTCAAAAATATGTTTTCCGCAAAATTGATTAGCGACATTTTACCTGAATTCGTAATCCATAACAAC
AACTATTCCGCATCTGAAAAAGAGGAGAAGACCCAAGTTATCAAACTTTTTTCACGTTTCGCGACATCTTTTAAAGACTACTTT
AAGAATCGTGCGAATTGTTTCAGTGCAGATGATATTGTGTCTAGTTCATGTCACCGTATCGTGAATGACAACGCTGAGATTTTC
TTTTCTAATGCGTTGGTGTATCGCCGCATCGTAAAGTCCTTGTCGAATGATGATATCAACAAAATTAGTGGTGACATGAAAGAC
TCCCTGAAAGAAATGTCATTAGAGGAGATTTACAGCTACGAAAAATACGGAGAGTTCATCACTCAGGAAGGTATCTCCTTTTAC
AACGATATTTGCGGCAAAGTTAATAGTTTCATGAATCTGTATTGTCAGAAGAATAAGGAAAACAAGAATCTGTACAAGTTACAA
AAGCTTCATAAACAGATCTTGTGCATCGCCGACACGTCTTATGAAGTCCCGTATAAATTTGAAAGCGACGAAGAAGTATATCAG
AGTGTGAATGGATTCTTGGACAATATCTCATCAAAACACATTGTTGAACGTTTGCGCAAAATCGGCGACAACTATAACGGATAC
AACTTGGATAAAATTTATATCGTATCAAAATTTTATGAATCAGTATCCCAAAAGACTTACCGTGATTGGGAGACTATTAATACG
GCGTTAGAAATCCATTACAACAACATTCTGCCGGGTAACGGTAAATCGAAAGCGGACAAAGTGAAGAAGGCGGTTAAGAACGAT
CTTCAGAAGTCTATCACGGAGATTAATGAGCTGGTTTCCAATTACAAGTTGTGCTCGGATGATAACATCAAAGCTGAAACCTAT
ATCCATGAAATTTCTCATATTCTTAATAACTTCGAGGCACAAGAATTAAAATATAACCCAGAAATTCATCTGGTTGAGAGCGAA
CTTAAAGCTTCAGAATTAAAAAATGTTTTGGACGTAATTATGAACGCCTTCCATTGGTGCAGCGTGTTTATGACAGAGGAGTTA
GTAGATAAGGATAACAACTTTTATGCAGAATTGGAAGAGATCTATGATGAGATCTATCCAGTGATTTCACTGTATAACTTAGTC
CGTAATTACGTCACTCAGAAGCCGTACTCAACTAAAAAGATCAAGTTAAATTTTGGAATTCCGACATTGGCGGATGGTTGGAGT
AAGTCTAAGGAATACTCAAATAACGCTATTATCTTAATGCGTGACAACCTGTATTACTTGGGTATTTTCAATGCCAAAAATAAG
CCCGATAAAAAAATCATTGAAGGGAATACTTCAGAAAATAAGGGAGATTACAAAAAAATGATTTATAACCTTTTGCCAGGCCCA
AACAAAATGATCCCCAAGGTGTTTTTGAGTAGTAAGACGGGAGTAGAAACATATAAGCCATCAGCGTACATTCTTGAAGGGTAC
AAACAAAATAAACACATCAAGAGCAGCAAGGACTTTGACATTACATTTTGTCATGACTTAATCGACTACTTTAAAAATTGCATT
GCCATTCACCCTGAGTGGAAAAATTTTGGTTTCGACTTCAGTGATACCTCTACCTATGAAGATATCTCTGGTTTTTATCGTGAG
GTAGAACTTCAGGGTTACAAGATCGATTGGACGTACATTTCCGAGAAAGACATTGATCTTTTACAAGAGAAGGGTCAGCTTTAC
TTATTTCAGATCTACAATAAAGACTTTTCGAAAAAATCCACGGGCAACGACAACCTTCATACAATGTACTTAAAGAACCTGTTC
TCTGAAGAAAACTTGAAAGATATCGTGCTTAAATTGAATGGCGAGGCCGAGATTTTTTTCCGTAAAAGCTCGATTAAGAATCCC
ATCATCCACAAGAAAGGCAGCATTCTGGTAAATCGTACCTATGAAGCGGAGGAAAAGGACCAATTTGGTAATATTCAGATTGTC
CGTAAGAACATCCCTGAAAATATCTATCAAGAATTATATAAATATTTCAACGATAAGTCGGACAAGGAACTTAGCGATGAAGCC
GCGAAGTTGAAAAATGTTGTTGGTCACCACGAAGCAGCAACAAACATTGTGAAAGACTATCGCTACACTTACGATAAGTACTTT
TTACATATGCCTATTACGATTAACTTTAAGGCAAATAAGACAGGTTTTATCAACGACCGTATCCTGCAATATATTGCAAAAGAG
AAGGACCTGCATGTCATTGGGATTGATCGCGGTGAACGCAATCTGATTTACGTGAGTGTTATTGATACCTGCGGTAATATTGTT
GAGCAAAAGTCTTTTAATATCGTTAATGGTTACGACTACCAAATTAAGCTTAAACAACAGGAAGGTGCCCGCCAGATCGCCCGT
AAGGAGTGGAAGGAAATCGGAAAAATTAAGGAAATCAAAGAGGGATATCTGAGCTTGGTTATTCATGAAATCTCAAAGATGGTT
ATTAAGTACAACGCCATCATCGCTATGGAAGACTTATCGTATGGGTTTAAAAAGGGTCGTTTCAAAGTTGAGCGCCAGGTCTAC
CAAAAGTTTGAAACGATGCTTATTAATAAATTAAACTACTTGGTTTTCAAAGATATCTCTATTACCGAGAATGGAGGTTTACTG
AAAGGATACCAGTTAACGTATATCCCCGATAAGCTTAAAAACGTGGGCCATCAGTGTGGCTGTATTTTCTATGTGCCCGCGGCA
TATACATCAAAAATTGACCCGACGACGGGTTTCGTTAATATCTTCAAGTTCAAAGATCTGACAGTTGATGCAAAACGCGAATTC
ATTAAGAAGTTCGATAGTATTCGCTATGACTCCGAGAAAAATTTGTTTTGCTTCACTTTTGACTACAATAACTTTATTACTCAG
AATACAGTCATGAGTAAAAGCTCCTGGTCGGTTTACACGTACGGGGTACGCATCAAACGTCGTTTTGTGAATGGTCGTTTTAGT
AATGAGTCGGATACAATTGATATTACCAAGGATATGGAGAAGACTCTGGAAATGACAGACATCAATTGGCGTGATGGACATGAT
TTGCGTCAGGACATTATCGACTATGAGATTGTGCAGCATATTTTCGAAATTTTTCGCCTGACGGTGCAAATGCGTAATTCCTTA
AGCGAACTGGAAGATCGCGACTATGACCGCTTAATTTCTCCTGTGCTGAATGAGAACAACATCTTCTATGACTCAGCGAAAGCC
GGGGACGCTTTGCCAAAGGATGCAGATGCTAACGGTGCATATTGTATTGCTCTGAAAGGCCTTTACGAGATCAAACAAATTACT
GAAAACTGGAAGGAAGATGGAAAGTTTTCCCGTGATAAATTGAAGATCTCTAATAAGGACTGGTTTGACTTTATCCAAAATAAA
CGTTATTTA
ErCas12a-S181V-AA (SEQ ID NO: 26)
MNNGTNNFQNFIGISSLQKTLRNALIPTETTQQFIVKNGIIKEDELRGENRQILKDIMDDYYRGFISETLSSIDDIDWTSLFEK
MEIQLKNGDNKDTLIKEQTEYRKAIHKKFANDDRFKNMFSAKLISDILPEFVIHNNNYSASEKEEKTQVIKLFSRFATSFKDYF
KNRANCFSADDIVSSSCHRIVNDNAEIFFSNALVYRRIVKSLSNDDINKISGDMKDSLKEMSLEEIYSYEKYGEFITQEGISFY
NDICGKVNSFMNLYCQKNKENKNLYKLQKLHKQILCIADTSYEVPYKFESDEEVYQSVNGELDNISSKHIVERLRKIGDNYNGY
NLDKIYIVSKFYESVSQKTYRDWETINTALEIHYNNILPGNGKSKADKVKKAVKNDLQKSITEINELVSNYKLCSDDNIKAETY
IHEISHILNNFEAQELKYNPEIHLVESELKASELKNVLDVIMNAFHWCSVFMTEELVDKDNNFYAELEEIYDEIYPVISLYNLV
RNYVTQKPYSTKKIKLNFGIPTLADGWSKSKEYSNNAIILMRDNLYYLGIFNAKNKPDKKIIEGNTSENKGDYKKMIYNLLPGP
NKMIPKVFLSSKTGVETYKPSAYILEGYKQNKHIKSSKDFDITFCHDLIDYFKNCIAIHPEWKNFGFDFSDTSTYEDISGFYRE
VELQGYKIDWTYISEKDIDLLQEKGQLYLFQIYNKDFSKKSTGNDNLHTMYLKNLFSEENLKDIVLKLNGEAEIFFRKSSIKNP
IIHKKGSILVNRTYEAEEKDQFGNIQIVRKNIPENIYQELYKYFNDKSDKELSDEAAKLKNVVGHHEAATNIVKDYRYTYDKYF
LHMPITINFKANKTGFINDRILQYIAKEKDLHVIGIDRGERNLIYVSVIDTCGNIVEQKSFNIVNGYDYQIKLKQQEGARQIAR
KEWKEIGKIKEIKEGYLSLVIHEISKMVIKYNAIIAMEDLSYGFKKGRFKVERQVYQKFETMLINKLNYLVFKDISITENGGLL
KGYQLTYIPDKLKNVGHQCGCIFYVPAAYTSKIDPTTGFVNIFKFKDLTVDAKREFIKKFDSIRYDSEKNLFCFTEDYNNFITQ
NTVMSKSSWSVYTYGVRIKRRFVNGRFSNESDTIDITKDMEKTLEMTDINWRDGHDLRQDIIDYEIVQHIFEIFRLTVQMRNSL
SELEDRDYDRLISPVLNENNIFYDSAKAGDALPKDADANGAYCIALKGLYEIKQITENWKEDGKFSRDKLKISNKDWFDFIQNK
RYL
ErCas12a-A290K-NT (SEQ ID NO: 27)
atgAATAACGGTACCAATAACTTTCAAAATTTTATCGGGATCTCCTCGTTGCAAAAAACTCTTCGTAATGCTTTAATCCCGACT
GAGACAACACAGCAGTTCATCGTTAAAAACGGCATCATTAAAGAAGATGAGCTGCGCGGCGAGAACCGTCAGATTTTAAAGGAC
ATCATGGACGACTATTACCGTGGGTTCATCTCAGAAACATTAAGCAGCATCGATGATATCGACTGGACCTCACTGTTTGAGAAG
ATGGAGATTCAACTTAAGAATGGAGACAACAAAGACACTTTAATTAAGGAGCAGACGGAATATCGTAAAGCTATCCATAAAAAA
TTTGCAAACGATGACCGTTTCAAAAATATGTTTTCCGCAAAATTGATTAGCGACATTTTACCTGAATTCGTAATCCATAACAAC
AACTATTCCGCATCTGAAAAAGAGGAGAAGACCCAAGTTATCAAACTTTTTTCACGTTTCGCGACATCTTTTAAAGACTACTTT
AAGAATCGTGCGAATTGTTTCAGTGCAGATGATATTTCGTCTAGTTCATGTCACCGTATCGTGAATGACAACGCTGAGATTTTC
TTTTCTAATGCGTTGGTGTATCGCCGCATCGTAAAGTCCTTGTCGAATGATGATATCAACAAAATTAGTGGTGACATGAAAGAC
TCCCTGAAAGAAATGTCATTAGAGGAGATTTACAGCTACGAAAAATACGGAGAGTTCATCACTCAGGAAGGTATCTCCTTTTAC
AACGATATTTGCGGCAAAGTTAATAGTTTCATGAATCTGTATTGTCAGAAGAATAAGGAAAACAAGAATCTGTACAAGTTACAA
AAGCTTCATAAACAGATCTTGTGCATCAAAGACACGTCTTATGAAGTCCCGTATAAATTTGAAAGCGACGAAGAAGTATATCAG
AGTGTGAATGGATTCTTGGACAATATCTCATCAAAACACATTGTTGAACGTTTGCGCAAAATCGGCGACAACTATAACGGATAC
AACTTGGATAAAATTTATATCGTATCAAAATTTTATGAATCAGTATCCCAAAAGACTTACCGTGATTGGGAGACTATTAATACG
GCGTTAGAAATCCATTACAACAACATTCTGCCGGGTAACGGTAAATCGAAAGCGGACAAAGTGAAGAAGGCGGTTAAGAACGAT
CTTCAGAAGTCTATCACGGAGATTAATGAGCTGGTTTCCAATTACAAGTTGTGCTCGGATGATAACATCAAAGCTGAAACCTAT
ATCCATGAAATTTCTCATATTCTTAATAACTTCGAGGCACAAGAATTAAAATATAACCCAGAAATTCATCTGGTTGAGAGCGAA
CTTAAAGCTTCAGAATTAAAAAATGTTTTGGACGTAATTATGAACGCCTTCCATTGGTGCAGCGTGTTTATGACAGAGGAGTTA
GTAGATAAGGATAACAACTTTTATGCAGAATTGGAAGAGATCTATGATGAGATCTATCCAGTGATTTCACTGTATAACTTAGTC
CGTAATTACGTCACTCAGAAGCCGTACTCAACTAAAAAGATCAAGTTAAATTTTGGAATTCCGACATTGGCGGATGGTTGGAGT
AAGTCTAAGGAATACTCAAATAACGCTATTATCTTAATGCGTGACAACCTGTATTACTTGGGTATTTTCAATGCCAAAAATAAG
CCCGATAAAAAAATCATTGAAGGGAATACTTCAGAAAATAAGGGAGATTACAAAAAAATGATTTATAACCTTTTGCCAGGCCCA
AACAAAATGATCCCCAAGGTGTTTTTGAGTAGTAAGACGGGAGTAGAAACATATAAGCCATCAGCGTACATTCTTGAAGGGTAC
AAACAAAATAAACACATCAAGAGCAGCAAGGACTTTGACATTACATTTTGTCATGACTTAATCGACTACTTTAAAAATTGCATT
GCCATTCACCCTGAGTGGAAAAATTTTGGTTTCGACTTCAGTGATACCTCTACCTATGAAGATATCTCTGGTTTTTATCGTGAG
GTAGAACTTCAGGGTTACAAGATCGATTGGACGTACATTTCCGAGAAAGACATTGATCTTTTACAAGAGAAGGGTCAGCTTTAC
TTATTTCAGATCTACAATAAAGACTTTTCGAAAAAATCCACGGGCAACGACAACCTTCATACAATGTACTTAAAGAACCTGTTC
TCTGAAGAAAACTTGAAAGATATCGTGCTTAAATTGAATGGCGAGGCCGAGATTTTTTTCCGTAAAAGCTCGATTAAGAATCCC
ATCATCCACAAGAAAGGCAGCATTCTGGTAAATCGTACCTATGAAGCGGAGGAAAAGGACCAATTTGGTAATATTCAGATTGTC
CGTAAGAACATCCCTGAAAATATCTATCAAGAATTATATAAATATTTCAACGATAAGTCGGACAAGGAACTTAGCGATGAAGCC
GCGAAGTTGAAAAATGTTGTTGGTCACCACGAAGCAGCAACAAACATTGTGAAAGACTATCGCTACACTTACGATAAGTACTTT
TTACATATGCCTATTACGATTAACTTTAAGGCAAATAAGACAGGTTTTATCAACGACCGTATCCTGCAATATATTGCAAAAGAG
AAGGACCTGCATGTCATTGGGATTGATCGCGGTGAACGCAATCTGATTTACGTGAGTGTTATTGATACCTGCGGTAATATTGTT
GAGCAAAAGTCTTTTAATATCGTTAATGGTTACGACTACCAAATTAAGCTTAAACAACAGGAAGGTGCCCGCCAGATCGCCCGT
AAGGAGTGGAAGGAAATCGGAAAAATTAAGGAAATCAAAGAGGGATATCTGAGCTTGGTTATTCATGAAATCTCAAAGATGGTT
ATTAAGTACAACGCCATCATCGCTATGGAAGACTTATCGTATGGGTTTAAAAAGGGTCGTTTCAAAGTTGAGCGCCAGGTCTAC
CAAAAGTTTGAAACGATGCTTATTAATAAATTAAACTACTTGGTTTTCAAAGATATCTCTATTACCGAGAATGGAGGTTTACTG
AAAGGATACCAGTTAACGTATATCCCCGATAAGCTTAAAAACGTGGGCCATCAGTGTGGCTGTATTTTCTATGTGCCCGCGGCA
TATACATCAAAAATTGACCCGACGACGGGTTTCGTTAATATCTTCAAGTTCAAAGATCTGACAGTTGATGCAAAACGCGAATTC
ATTAAGAAGTTCGATAGTATTCGCTATGACTCCGAGAAAAATTTGTTTTGCTTCACTTTTGACTACAATAACTTTATTACTCAG
AATACAGTCATGAGTAAAAGCTCCTGGTCGGTTTACACGTACGGGGTACGCATCAAACGTCGTTTTGTGAATGGTCGTTTTAGT
AATGAGTCGGATACAATTGATATTACCAAGGATATGGAGAAGACTCTGGAAATGACAGACATCAATTGGCGTGATGGACATGAT
TTGCGTCAGGACATTATCGACTATGAGATTGTGCAGCATATTTTCGAAATTTTTCGCCTGACGGTGCAAATGCGTAATTCCTTA
AGCGAACTGGAAGATCGCGACTATGACCGCTTAATTTCTCCTGTGCTGAATGAGAACAACATCTTCTATGACTCAGCGAAAGCC
GGGGACGCTTTGCCAAAGGATGCAGATGCTAACGGTGCATATTGTATTGCTCTGAAAGGCCTTTACGAGATCAAACAAATTACT
GAAAACTGGAAGGAAGATGGAAAGTTTTCCCGTGATAAATTGAAGATCTCTAATAAGGACTGGTTTGACTTTATCCAAAATAAA
CGTTATTTA
ErCas12a-A290K-AA (SEQ ID NO: 28)
MNNGTNNFQNFIGISSLQKTLRNALIPTETTQQFIVKNGIIKEDELRGENRQILKDIMDDYYRGFISETLSSIDDIDWTSLFEK
MEIQLKNGDNKDTLIKEQTEYRKAIHKKFANDDRFKNMFSAKLISDILPEFVIHNNNYSASEKEEKTQVIKLFSRFATSFKDYF
KNRANCFSADDISSSSCHRIVNDNAEIFFSNALVYRRIVKSLSNDDINKISGDMKDSLKEMSLEEIYSYEKYGEFITQEGISFY
NDICGKVNSFMNLYCQKNKENKNLYKLQKLHKQILCIKDTSYEVPYKFESDEEVYQSVNGELDNISSKHIVERLRKIGDNYNGY
NLDKIYIVSKFYESVSQKTYRDWETINTALEIHYNNILPGNGKSKADKVKKAVKNDLQKSITEINELVSNYKLCSDDNIKAETY
IHEISHILNNFEAQELKYNPEIHLVESELKASELKNVLDVIMNAFHWCSVFMTEELVDKDNNFYAELEEIYDEIYPVISLYNLV
RNYVTQKPYSTKKIKLNFGIPTLADGWSKSKEYSNNAIILMRDNLYYLGIFNAKNKPDKKIIEGNTSENKGDYKKMIYNLLPGP
NKMIPKVFLSSKTGVETYKPSAYILEGYKQNKHIKSSKDFDITFCHDLIDYFKNCIAIHPEWKNFGFDFSDTSTYEDISGFYRE
VELQGYKIDWTYISEKDIDLLQEKGQLYLFQIYNKDFSKKSTGNDNLHTMYLKNLFSEENLKDIVLKLNGEAEIFFRKSSIKNP
IIHKKGSILVNRTYEAEEKDQFGNIQIVRKNIPENIYQELYKYFNDKSDKELSDEAAKLKNVVGHHEAATNIVKDYRYTYDKYF
LHMPITINFKANKTGFINDRILQYIAKEKDLHVIGIDRGERNLIYVSVIDTCGNIVEQKSFNIVNGYDYQIKLKQQEGARQIAR
KEWKEIGKIKEIKEGYLSLVIHEISKMVIKYNAIIAMEDLSYGFKKGRFKVERQVYQKFETMLINKLNYLVFKDISITENGGLL
KGYQLTYIPDKLKNVGHQCGCIFYVPAAYTSKIDPTTGFVNIFKFKDLTVDAKREFIKKFDSIRYDSEKNLFCFTEDYNNFITQ
NTVMSKSSWSVYTYGVRIKRRFVNGRFSNESDTIDITKDMEKTLEMTDINWRDGHDLRQDIIDYEIVQHIFEIFRLTVQMRNSL
SELEDRDYDRLISPVLNENNIFYDSAKAGDALPKDADANGAYCIALKGLYEIKQITENWKEDGKFSRDKLKISNKDWEDFIQNK
RYL
ErCas12a-D291N-NT (SEQ ID NO: 29)
atgAATAACGGTACCAATAACTTTCAAAATTTTATCGGGATCTCCTCGTTGCAAAAAACTCTTCGTAATGCTTTAATCCCGACT
GAGACAACACAGCAGTTCATCGTTAAAAACGGCATCATTAAAGAAGATGAGCTGCGCGGCGAGAACCGTCAGATTTTAAAGGAC
ATCATGGACGACTATTACCGTGGGTTCATCTCAGAAACATTAAGCAGCATCGATGATATCGACTGGACCTCACTGTTTGAGAAG
ATGGAGATTCAACTTAAGAATGGAGACAACAAAGACACTTTAATTAAGGAGCAGACGGAATATCGTAAAGCTATCCATAAAAAA
TTTGCAAACGATGACCGTTTCAAAAATATGTTTTCCGCAAAATTGATTAGCGACATTTTACCTGAATTCGTAATCCATAACAAC
AACTATTCCGCATCTGAAAAAGAGGAGAAGACCCAAGTTATCAAACTTTTTTCACGTTTCGCGACATCTTTTAAAGACTACTTT
AAGAATCGTGCGAATTGTTTCAGTGCAGATGATATTTCGTCTAGTTCATGTCACCGTATCGTGAATGACAACGCTGAGATTTTC
TTTTCTAATGCGTTGGTGTATCGCCGCATCGTAAAGTCCTTGTCGAATGATGATATCAACAAAATTAGTGGTGACATGAAAGAC
TCCCTGAAAGAAATGTCATTAGAGGAGATTTACAGCTACGAAAAATACGGAGAGTTCATCACTCAGGAAGGTATCTCCTTTTAC
AACGATATTTGCGGCAAAGTTAATAGTTTCATGAATCTGTATTGTCAGAAGAATAAGGAAAACAAGAATCTGTACAAGTTACAA
AAGCTTCATAAACAGATCTTGTGCATCGCCACCACGTCTTATGAAGTCCCGTATAAATTTGAAAGCGACGAAGAAGTATATCAG
AGTGTGAATGGATTCTTGGACAATATCTCATCAAAACACATTGTTGAACGTTTGCGCAAAATCGGCGACAACTATAACGGATAC
AACTTGGATAAAATTTATATCGTATCAAAATTTTATGAATCAGTATCCCAAAAGACTTACCGTGATTGGGAGACTATTAATACG
GCGTTAGAAATCCATTACAACAACATTCTGCCGGGTAACGGTAAATCGAAAGCGGACAAAGTGAAGAAGGCGGTTAAGAACGAT
CTTCAGAAGTCTATCACGGAGATTAATGAGCTGGTTTCCAATTACAAGTTGTGCTCGGATGATAACATCAAAGCTGAAACCTAT
ATCCATGAAATTTCTCATATTCTTAATAACTTCGAGGCACAAGAATTAAAATATAACCCAGAAATTCATCTGGTTGAGAGCGAA
CTTAAAGCTTCAGAATTAAAAAATGTTTTGGACGTAATTATGAACGCCTTCCATTGGTGCAGCGTGTTTATGACAGAGGAGTTA
GTAGATAAGGATAACAACTTTTATGCAGAATTGGAAGAGATCTATGATGAGATCTATCCAGTGATTTCACTGTATAACTTAGTC
CGTAATTACGTCACTCAGAAGCCGTACTCAACTAAAAAGATCAAGTTAAATTTTGGAATTCCGACATTGGCGGATGGTTGGAGT
AAGTCTAAGGAATACTCAAATAACGCTATTATCTTAATGCGTGACAACCTGTATTACTTGGGTATTTTCAATGCCAAAAATAAG
CCCGATAAAAAAATCATTGAAGGGAATACTTCAGAAAATAAGGGAGATTACAAAAAAATGATTTATAACCTTTTGCCAGGCCCA
AACAAAATGATCCCCAAGGTGTTTTTGAGTAGTAAGACGGGAGTAGAAACATATAAGCCATCAGCGTACATTCTTGAAGGGTAC
AAACAAAATAAACACATCAAGAGCAGCAAGGACTTTGACATTACATTTTGTCATGACTTAATCGACTACTTTAAAAATTGCATT
GCCATTCACCCTGAGTGGAAAAATTTTGGTTTCGACTTCAGTGATACCTCTACCTATGAAGATATCTCTGGTTTTTATCGTGAG
GTAGAACTTCAGGGTTACAAGATCGATTGGACGTACATTTCCGAGAAAGACATTGATCTTTTACAAGAGAAGGGTCAGCTTTAC
TTATTTCAGATCTACAATAAAGACTTTTCGAAAAAATCCACGGGCAACGACAACCTTCATACAATGTACTTAAAGAACCTGTTC
TCTGAAGAAAACTTGAAAGATATCGTGCTTAAATTGAATGGCGAGGCCGAGATTTTTTTCCGTAAAAGCTCGATTAAGAATCCC
ATCATCCACAAGAAAGGCAGCATTCTGGTAAATCGTACCTATGAAGCGGAGGAAAAGGACCAATTTGGTAATATTCAGATTGTC
CGTAAGAACATCCCTGAAAATATCTATCAAGAATTATATAAATATTTCAACGATAAGTCGGACAAGGAACTTAGCGATGAAGCC
GCGAAGTTGAAAAATGTTGTTGGTCACCACGAAGCAGCAACAAACATTGTGAAAGACTATCGCTACACTTACGATAAGTACTTT
TTACATATGCCTATTACGATTAACTTTAAGGCAAATAAGACAGGTTTTATCAACGACCGTATCCTGCAATATATTGCAAAAGAG
AAGGACCTGCATGTCATTGGGATTGATCGCGGTGAACGCAATCTGATTTACGTGAGTGTTATTGATACCTGCGGTAATATTGTT
GAGCAAAAGTCTTTTAATATCGTTAATGGTTACGACTACCAAATTAAGCTTAAACAACAGGAAGGTGCCCGCCAGATCGCCCGT
AAGGAGTGGAAGGAAATCGGAAAAATTAAGGAAATCAAAGAGGGATATCTGAGCTTGGTTATTCATGAAATCTCAAAGATGGTT
ATTAAGTACAACGCCATCATCGCTATGGAAGACTTATCGTATGGGTTTAAAAAGGGTCGTTTCAAAGTTGAGCGCCAGGTCTAC
CAAAAGTTTGAAACGATGCTTATTAATAAATTAAACTACTTGGTTTTCAAAGATATCTCTATTACCGAGAATGGAGGTTTACTG
AAAGGATACCAGTTAACGTATATCCCCGATAAGCTTAAAAACGTGGGCCATCAGTGTGGCTGTATTTTCTATGTGCCCGCGGCA
TATACATCAAAAATTGACCCGACGACGGGTTTCGTTAATATCTTCAAGTTCAAAGATCTGACAGTTGATGCAAAACGCGAATTC
ATTAAGAAGTTCGATAGTATTCGCTATGACTCCGAGAAAAATTTGTTTTGCTTCACTTTTGACTACAATAACTTTATTACTCAG
AATACAGTCATGAGTAAAAGCTCCTGGTCGGTTTACACGTACGGGGTACGCATCAAACGTCGTTTTGTGAATGGTCGTTTTAGT
AATGAGTCGGATACAATTGATATTACCAAGGATATGGAGAAGACTCTGGAAATGACAGACATCAATTGGCGTGATGGACATGAT
TTGCGTCAGGACATTATCGACTATGAGATTGTGCAGCATATTTTCGAAATTTTTCGCCTGACGGTGCAAATGCGTAATTCCTTA
AGCGAACTGGAAGATCGCGACTATGACCGCTTAATTTCTCCTGTGCTGAATGAGAACAACATCTTCTATGACTCAGCGAAAGCC
GGGGACGCTTTGCCAAAGGATGCAGATGCTAACGGTGCATATTGTATTGCTCTGAAAGGCCTTTACGAGATCAAACAAATTACT
GAAAACTGGAAGGAAGATGGAAAGTTTTCCCGTGATAAATTGAAGATCTCTAATAAGGACTGGTTTGACTTTATCCAAAATAAA
CGTTATTTA
ErCas12a-D291N-AA (SEQ ID NO: 30)
MNNGTNNFQNFIGISSLQKTLRNALIPTETTQQFIVKNGIIKEDELRGENRQILKDIMDDYYRGFISETLSSIDDIDWTSLFEK
MEIQLKNGDNKDTLIKEQTEYRKAIHKKFANDDRFKNMFSAKLISDILPEFVIHNNNYSASEKEEKTQVIKLFSRFATSFKDYF
KNRANCESADDISSSSCHRIVNDNAEIFFSNALVYRRIVKSLSNDDINKISGDMKDSLKEMSLEEIYSYEKYGEFITQEGISFY
NDICGKVNSFMNLYCQKNKENKNLYKLQKLHKQILCIANTSYEVPYKFESDEEVYQSVNGELDNISSKHIVERLRKIGDNYNGY
NLDKIYIVSKFYESVSQKTYRDWETINTALEIHYNNILPGNGKSKADKVKKAVKNDLQKSITEINELVSNYKLCSDDNIKAETY
IHEISHILNNFEAQELKYNPEIHLVESELKASELKNVLDVIMNAFHWCSVFMTEELVDKDNNFYAELEEIYDEIYPVISLYNLV
RNYVTQKPYSTKKIKLNFGIPTLADGWSKSKEYSNNAIILMRDNLYYLGIFNAKNKPDKKIIEGNTSENKGDYKKMIYNLLPGP
NKMIPKVFLSSKTGVETYKPSAYILEGYKQNKHIKSSKDFDITFCHDLIDYFKNCIAIHPEWKNFGFDFSDTSTYEDISGFYRE
VELQGYKIDWTYISEKDIDLLQEKGQLYLFQIYNKDFSKKSTGNDNLHTMYLKNLFSEENLKDIVLKLNGEAEIFFRKSSIKNP
IIHKKGSILVNRTYEAEEKDQFGNIQIVRKNIPENIYQELYKYFNDKSDKELSDEAAKLKNVVGHHEAATNIVKDYRYTYDKYF
LHMPITINFKANKTGFINDRILQYIAKEKDLHVIGIDRGERNLIYVSVIDTCGNIVEQKSFNIVNGYDYQIKLKQQEGARQIAR
KEWKEIGKIKEIKEGYLSLVIHEISKMVIKYNAIIAMEDLSYGFKKGRFKVERQVYQKFETMLINKLNYLVFKDISITENGGLL
KGYQLTYIPDKLKNVGHQCGCIFYVPAAYTSKIDPTTGFVNIFKFKDLTVDAKREFIKKFDSIRYDSEKNLFCFTEDYNNFITQ
NTVMSKSSWSVYTYGVRIKRRFVNGRFSNESDTIDITKDMEKTLEMTDINWRDGHDLRQDIIDYEIVQHIFEIFRLTVQMRNSL
SELEDRDYDRLISPVLNENNIFYDSAKAGDALPKDADANGAYCIALKGLYEIKQITENWKEDGKFSRDKLKISNKDWFDFIQNK
RYL
ErCas12a-V296R-NT (SEQ ID NO: 31)
atgAATAACGGTACCAATAACTTTCAAAATTTTATCGGGATCTCCTCGTTGCAAAAAACTCTTCGTAATGCTTTAATCCCGACT
GAGACAACACAGCAGTTCATCGTTAAAAACGGCATCATTAAAGAAGATGAGCTGCGCGGCGAGAACCGTCAGATTTTAAAGGAC
ATCATGGACGACTATTACCGTGGGTTCATCTCAGAAACATTAAGCAGCATCGATGATATCGACTGGACCTCACTGTTTGAGAAG
ATGGAGATTCAACTTAAGAATGGAGACAACAAAGACACTTTAATTAAGGAGCAGACGGAATATCGTAAAGCTATCCATAAAAAA
TTTGCAAACGATGACCGTTTCAAAAATATGTTTTCCGCAAAATTGATTAGCGACATTTTACCTGAATTCGTAATCCATAACAAC
AACTATTCCGCATCTGAAAAAGAGGAGAAGACCCAAGTTATCAAACTTTTTTCACGTTTCGCGACATCTTTTAAAGACTACTTT
AAGAATCGTGCGAATTGTTTCAGTGCAGATGATATTTCGTCTAGTTCATGTCACCGTATCGTGAATGACAACGCTGAGATTTTC
TTTTCTAATGCGTTGGTGTATCGCCGCATCGTAAAGTCCTTGTCGAATGATGATATCAACAAAATTAGTGGTGACATGAAAGAC
TCCCTGAAAGAAATGTCATTAGAGGAGATTTACAGCTACGAAAAATACGGAGAGTTCATCACTCAGGAAGGTATCTCCTTTTAC
AACGATATTTGCGGCAAAGTTAATAGTTTCATGAATCTGTATTGTCAGAAGAATAAGGAAAACAAGAATCTGTACAAGTTACAA
AAGCTTCATAAACAGATCTTGTGCATCGCCGACACGTCTTATGAACGTCCGTATAAATTTGAAAGCGACGAAGAAGTATATCAG
AGTGTGAATGGATTCTTGGACAATATCTCATCAAAACACATTGTTGAACGTTTGCGCAAAATCGGCGACAACTATAACGGATAC
AACTTGGATAAAATTTATATCGTATCAAAATTTTATGAATCAGTATCCCAAAAGACTTACCGTGATTGGGAGACTATTAATACG
GCGTTAGAAATCCATTACAACAACATTCTGCCGGGTAACGGTAAATCGAAAGCGGACAAAGTGAAGAAGGCGGTTAAGAACGAT
CTTCAGAAGTCTATCACGGAGATTAATGAGCTGGTTTCCAATTACAAGTTGTGCTCGGATGATAACATCAAAGCTGAAACCTAT
ATCCATGAAATTTCTCATATTCTTAATAACTTCGAGGCACAAGAATTAAAATATAACCCAGAAATTCATCTGGTTGAGAGCGAA
CTTAAAGCTTCAGAATTAAAAAATGTTTTGGACGTAATTATGAACGCCTTCCATTGGTGCAGCGTGTTTATGACAGAGGAGTTA
GTAGATAAGGATAACAACTTTTATGCAGAATTGGAAGAGATCTATGATGAGATCTATCCAGTGATTTCACTGTATAACTTAGTC
CGTAATTACGTCACTCAGAAGCCGTACTCAACTAAAAAGATCAAGTTAAATTTTGGAATTCCGACATTGGCGGATGGTTGGAGT
AAGTCTAAGGAATACTCAAATAACGCTATTATCTTAATGCGTGACAACCTGTATTACTTGGGTATTTTCAATGCCAAAAATAAG
CCCGATAAAAAAATCATTGAAGGGAATACTTCAGAAAATAAGGGAGATTACAAAAAAATGATTTATAACCTTTTGCCAGGCCCA
AACAAAATGATCCCCAAGGTGTTTTTGAGTAGTAAGACGGGAGTAGAAACATATAAGCCATCAGCGTACATTCTTGAAGGGTAC
AAACAAAATAAACACATCAAGAGCAGCAAGGACTTTGACATTACATTTTGTCATGACTTAATCGACTACTTTAAAAATTGCATT
GCCATTCACCCTGAGTGGAAAAATTTTGGTTTCGACTTCAGTGATACCTCTACCTATGAAGATATCTCTGGTTTTTATCGTGAG
GTAGAACTTCAGGGTTACAAGATCGATTGGACGTACATTTCCGAGAAAGACATTGATCTTTTACAAGAGAAGGGTCAGCTTTAC
TTATTTCAGATCTACAATAAAGACTTTTCGAAAAAATCCACGGGCAACGACAACCTTCATACAATGTACTTAAAGAACCTGTTC
TCTGAAGAAAACTTGAAAGATATCGTGCTTAAATTGAATGGCGAGGCCGAGATTTTTTTCCGTAAAAGCTCGATTAAGAATCCC
ATCATCCACAAGAAAGGCAGCATTCTGGTAAATCGTACCTATGAAGCGGAGGAAAAGGACCAATTTGGTAATATTCAGATTGTC
CGTAAGAACATCCCTGAAAATATCTATCAAGAATTATATAAATATTTCAACGATAAGTCGGACAAGGAACTTAGCGATGAAGCC
GCGAAGTTGAAAAATGTTGTTGGTCACCACGAAGCAGCAACAAACATTGTGAAAGACTATCGCTACACTTACGATAAGTACTTT
TTACATATGCCTATTACGATTAACTTTAAGGCAAATAAGACAGGTTTTATCAACGACCGTATCCTGCAATATATTGCAAAAGAG
AAGGACCTGCATGTCATTGGGATTGATCGCGGTGAACGCAATCTGATTTACGTGAGTGTTATTGATACCTGCGGTAATATTGTT
GAGCAAAAGTCTTTTAATATCGTTAATGGTTACGACTACCAAATTAAGCTTAAACAACAGGAAGGTGCCCGCCAGATCGCCCGT
AAGGAGTGGAAGGAAATCGGAAAAATTAAGGAAATCAAAGAGGGATATCTGAGCTTGGTTATTCATGAAATCTCAAAGATGGTT
ATTAAGTACAACGCCATCATCGCTATGGAAGACTTATCGTATGGGTTTAAAAAGGGTCGTTTCAAAGTTGAGCGCCAGGTCTAC
CAAAAGTTTGAAACGATGCTTATTAATAAATTAAACTACTTGGTTTTCAAAGATATCTCTATTACCGAGAATGGAGGTTTACTG
AAAGGATACCAGTTAACGTATATCCCCGATAAGCTTAAAAACGTGGGCCATCAGTGTGGCTGTATTTTCTATGTGCCCGCGGCA
TATACATCAAAAATTGACCCGACGACGGGTTTCGTTAATATCTTCAAGTTCAAAGATCTGACAGTTGATGCAAAACGCGAATTC
ATTAAGAAGTTCGATAGTATTCGCTATGACTCCGAGAAAAATTTGTTTTGCTTCACTTTTGACTACAATAACTTTATTACTCAG
AATACAGTCATGAGTAAAAGCTCCTGGTCGGTTTACACGTACGGGGTACGCATCAAACGTCGTTTTGTGAATGGTCGTTTTAGT
AATGAGTCGGATACAATTGATATTACCAAGGATATGGAGAAGACTCTGGAAATGACAGACATCAATTGGCGTGATGGACATGAT
TTGCGTCAGGACATTATCGACTATGAGATTGTGCAGCATATTTTCGAAATTTTTCGCCTGACGGTGCAAATGCGTAATTCCTTA
AGCGAACTGGAAGATCGCGACTATGACCGCTTAATTTCTCCTGTGCTGAATGAGAACAACATCTTCTATGACTCAGCGAAAGCC
GGGGACGCTTTGCCAAAGGATGCAGATGCTAACGGTGCATATTGTATTGCTCTGAAAGGCCTTTACGAGATCAAACAAATTACT
GAAAACTGGAAGGAAGATGGAAAGTTTTCCCGTGATAAATTGAAGATCTCTAATAAGGACTGGTTTGACTTTATCCAAAATAAA
CGTTATTTA
ErCas12a-V296R-AA (SEQ ID NO: 32)
MNNGTNNFQNFIGISSLQKTLRNALIPTETTQQFIVKNGIIKEDELRGENRQILKDIMDDYYRGFISETLSSIDDIDWTSLFEK
MEIQLKNGDNKDTLIKEQTEYRKAIHKKFANDDRFKNMFSAKLISDILPEFVIHNNNYSASEKEEKTQVIKLFSRFATSFKDYF
KNRANCFSADDISSSSCHRIVNDNAEIFFSNALVYRRIVKSLSNDDINKISGDMKDSLKEMSLEEIYSYEKYGEFITQEGISFY
NDICGKVNSFMNLYCQKNKENKNLYKLQKLHKQILCIADTSYERPYKFESDEEVYQSVNGELDNISSKHIVERLRKIGDNYNGY
NLDKIYIVSKFYESVSQKTYRDWETINTALEIHYNNILPGNGKSKADKVKKAVKNDLQKSITEINELVSNYKLCSDDNIKAETY
IHEISHILNNFEAQELKYNPEIHLVESELKASELKNVLDVIMNAFHWCSVFMTEELVDKDNNFYAELEEIYDEIYPVISLYNLV
RNYVTQKPYSTKKIKLNFGIPTLADGWSKSKEYSNNAIILMRDNLYYLGIFNAKNKPDKKIIEGNTSENKGDYKKMIYNLLPGP
NKMIPKVFLSSKTGVETYKPSAYILEGYKQNKHIKSSKDFDITFCHDLIDYFKNCIAIHPEWKNFGFDFSDTSTYEDISGFYRE
VELQGYKIDWTYISEKDIDLLQEKGQLYLFQIYNKDFSKKSTGNDNLHTMYLKNLFSEENLKDIVLKLNGEAEIFFRKSSIKNP
IIHKKGSILVNRTYEAEEKDQFGNIQIVRKNIPENIYQELYKYFNDKSDKELSDEAAKLKNVVGHHEAATNIVKDYRYTYDKYF
LHMPITINFKANKTGFINDRILQYIAKEKDLHVIGIDRGERNLIYVSVIDTCGNIVEQKSFNIVNGYDYQIKLKQQEGARQIAR
KEWKEIGKIKEIKEGYLSLVIHEISKMVIKYNAIIAMEDLSYGFKKGRFKVERQVYQKFETMLINKLNYLVFKDISITENGGLL
KGYQLTYIPDKLKNVGHQCGCIFYVPAAYTSKIDPTTGFVNIFKFKDLTVDAKREFIKKFDSIRYDSEKNLFCFTEDYNNFITQ
NTVMSKSSWSVYTYGVRIKRRFVNGRFSNESDTIDITKDMEKTLEMTDINWRDGHDLRQDIIDYEIVQHIFEIFRLTVQMRNSL
SELEDRDYDRLISPVLNENNIFYDSAKAGDALPKDADANGAYCIALKGLYEIKQITENWKEDGKFSRDKLKISNKDWFDFIQNK
RYL
ErCas12a-P297V-NT (SEQ ID NO: 33)
atgAATAACGGTACCAATAACTTTCAAAATTTTATCGGGATCTCCTCGTTGCAAAAAACTCTTCGTAATGCTTTAATCCCGACT
GAGACAACACAGCAGTTCATCGTTAAAAACGGCATCATTAAAGAAGATGAGCTGCGCGGCGAGAACCGTCAGATTTTAAAGGAC
ATCATGGACGACTATTACCGTGGGTTCATCTCAGAAACATTAAGCAGCATCGATGATATCGACTGGACCTCACTGTTTGAGAAG
ATGGAGATTCAACTTAAGAATGGAGACAACAAAGACACTTTAATTAAGGAGCAGACGGAATATCGTAAAGCTATCCATAAAAAA
TTTGCAAACGATGACCGTTTCAAAAATATGTTTTCCGCAAAATTGATTAGCGACATTTTACCTGAATTCGTAATCCATAACAAC
AACTATTCCGCATCTGAAAAAGAGGAGAAGACCCAAGTTATCAAACTTTTTTCACGTTTCGCGACATCTTTTAAAGACTACTTT
AAGAATCGTGCGAATTGTTTCAGTGCAGATGATATTTCGTCTAGTTCATGTCACCGTATCGTGAATGACAACGCTGAGATTTTC
TTTTCTAATGCGTTGGTGTATCGCCGCATCGTAAAGTCCTTGTCGAATGATGATATCAACAAAATTAGTGGTGACATGAAAGAC
TCCCTGAAAGAAATGTCATTAGAGGAGATTTACAGCTACGAAAAATACGGAGAGTTCATCACTCAGGAAGGTATCTCCTTTTAC
AACGATATTTGCGGCAAAGTTAATAGTTTCATGAATCTGTATTGTCAGAAGAATAAGGAAAACAAGAATCTGTACAAGTTACAA
AAGCTTCATAAACAGATCTTGTGCATCGCCGACACGTCTTATGAAGTCGTGTATAAATTTGAAAGCGACGAAGAAGTATATCAG
AGTGTGAATGGATTCTTGGACAATATCTCATCAAAACACATTGTTGAACGTTTGCGCAAAATCGGCGACAACTATAACGGATAC
AACTTGGATAAAATTTATATCGTATCAAAATTTTATGAATCAGTATCCCAAAAGACTTACCGTGATTGGGAGACTATTAATACG
GCGTTAGAAATCCATTACAACAACATTCTGCCGGGTAACGGTAAATCGAAAGCGGACAAAGTGAAGAAGGCGGTTAAGAACGAT
CTTCAGAAGTCTATCACGGAGATTAATGAGCTGGTTTCCAATTACAAGTTGTGCTCGGATGATAACATCAAAGCTGAAACCTAT
ATCCATGAAATTTCTCATATTCTTAATAACTTCGAGGCACAAGAATTAAAATATAACCCAGAAATTCATCTGGTTGAGAGCGAA
CTTAAAGCTTCAGAATTAAAAAATGTTTTGGACGTAATTATGAACGCCTTCCATTGGTGCAGCGTGTTTATGACAGAGGAGTTA
GTAGATAAGGATAACAACTTTTATGCAGAATTGGAAGAGATCTATGATGAGATCTATCCAGTGATTTCACTGTATAACTTAGTC
CGTAATTACGTCACTCAGAAGCCGTACTCAACTAAAAAGATCAAGTTAAATTTTGGAATTCCGACATTGGCGGATGGTTGGAGT
AAGTCTAAGGAATACTCAAATAACGCTATTATCTTAATGCGTGACAACCTGTATTACTTGGGTATTTTCAATGCCAAAAATAAG
CCCGATAAAAAAATCATTGAAGGGAATACTTCAGAAAATAAGGGAGATTACAAAAAAATGATTTATAACCTTTTGCCAGGCCCA
AACAAAATGATCCCCAAGGTGTTTTTGAGTAGTAAGACGGGAGTAGAAACATATAAGCCATCAGCGTACATTCTTGAAGGGTAC
AAACAAAATAAACACATCAAGAGCAGCAAGGACTTTGACATTACATTTTGTCATGACTTAATCGACTACTTTAAAAATTGCATT
GCCATTCACCCTGAGTGGAAAAATTTTGGTTTCGACTTCAGTGATACCTCTACCTATGAAGATATCTCTGGTTTTTATCGTGAG
GTAGAACTTCAGGGTTACAAGATCGATTGGACGTACATTTCCGAGAAAGACATTGATCTTTTACAAGAGAAGGGTCAGCTTTAC
TTATTTCAGATCTACAATAAAGACTTTTCGAAAAAATCCACGGGCAACGACAACCTTCATACAATGTACTTAAAGAACCTGTTC
TCTGAAGAAAACTTGAAAGATATCGTGCTTAAATTGAATGGCGAGGCCGAGATTTTTTTCCGTAAAAGCTCGATTAAGAATCCC
ATCATCCACAAGAAAGGCAGCATTCTGGTAAATCGTACCTATGAAGCGGAGGAAAAGGACCAATTTGGTAATATTCAGATTGTC
CGTAAGAACATCCCTGAAAATATCTATCAAGAATTATATAAATATTTCAACGATAAGTCGGACAAGGAACTTAGCGATGAAGCC
GCGAAGTTGAAAAATGTTGTTGGTCACCACGAAGCAGCAACAAACATTGTGAAAGACTATCGCTACACTTACGATAAGTACTTT
TTACATATGCCTATTACGATTAACTTTAAGGCAAATAAGACAGGTTTTATCAACGACCGTATCCTGCAATATATTGCAAAAGAG
AAGGACCTGCATGTCATTGGGATTGATCGCGGTGAACGCAATCTGATTTACGTGAGTGTTATTGATACCTGCGGTAATATTGTT
GAGCAAAAGTCTTTTAATATCGTTAATGGTTACGACTACCAAATTAAGCTTAAACAACAGGAAGGTGCCCGCCAGATCGCCCGT
AAGGAGTGGAAGGAAATCGGAAAAATTAAGGAAATCAAAGAGGGATATCTGAGCTTGGTTATTCATGAAATCTCAAAGATGGTT
ATTAAGTACAACGCCATCATCGCTATGGAAGACTTATCGTATGGGTTTAAAAAGGGTCGTTTCAAAGTTGAGCGCCAGGTCTAC
CAAAAGTTTGAAACGATGCTTATTAATAAATTAAACTACTTGGTTTTCAAAGATATCTCTATTACCGAGAATGGAGGTTTACTG
AAAGGATACCAGTTAACGTATATCCCCGATAAGCTTAAAAACGTGGGCCATCAGTGTGGCTGTATTTTCTATGTGCCCGCGGCA
TATACATCAAAAATTGACCCGACGACGGGTTTCGTTAATATCTTCAAGTTCAAAGATCTGACAGTTGATGCAAAACGCGAATTC
ATTAAGAAGTTCGATAGTATTCGCTATGACTCCGAGAAAAATTTGTTTTGCTTCACTTTTGACTACAATAACTTTATTACTCAG
AATACAGTCATGAGTAAAAGCTCCTGGTCGGTTTACACGTACGGGGTACGCATCAAACGTCGTTTTGTGAATGGTCGTTTTAGT
AATGAGTCGGATACAATTGATATTACCAAGGATATGGAGAAGACTCTGGAAATGACAGACATCAATTGGCGTGATGGACATGAT
TTGCGTCAGGACATTATCGACTATGAGATTGTGCAGCATATTTTCGAAATTTTTCGCCTGACGGTGCAAATGCGTAATTCCTTA
AGCGAACTGGAAGATCGCGACTATGACCGCTTAATTTCTCCTGTGCTGAATGAGAACAACATCTTCTATGACTCAGCGAAAGCC
GGGGACGCTTTGCCAAAGGATGCAGATGCTAACGGTGCATATTGTATTGCTCTGAAAGGCCTTTACGAGATCAAACAAATTACT
GAAAACTGGAAGGAAGATGGAAAGTTTTCCCGTGATAAATTGAAGATCTCTAATAAGGACTGGTTTGACTTTATCCAAAATAAA
CGTTATTTA
ErCas12a-P297V-AA (SEQ ID NO: 34)
MNNGTNNFQNFIGISSLQKTLRNALIPTETTQQFIVKNGIIKEDELRGENRQILKDIMDDYYRGFISETLSSIDDIDWTSLFEK
MEIQLKNGDNKDTLIKEQTEYRKAIHKKFANDDRFKNMFSAKLISDILPEFVIHNNNYSASEKEEKTQVIKLFSRFATSFKDYF
KNRANCESADDISSSSCHRIVNDNAEIFFSNALVYRRIVKSLSNDDINKISGDMKDSLKEMSLEEIYSYEKYGEFITQEGISFY
NDICGKVNSFMNLYCQKNKENKNLYKLQKLHKQILCIADTSYEVVYKFESDEEVYQSVNGELDNISSKHIVERLRKIGDNYNGY
NLDKIYIVSKFYESVSQKTYRDWETINTALEIHYNNILPGNGKSKADKVKKAVKNDLQKSITEINELVSNYKLCSDDNIKAETY
IHEISHILNNFEAQELKYNPEIHLVESELKASELKNVLDVIMNAFHWCSVFMTEELVDKDNNFYAELEEIYDEIYPVISLYNLV
RNYVTQKPYSTKKIKLNFGIPTLADGWSKSKEYSNNAIILMRDNLYYLGIFNAKNKPDKKIIEGNTSENKGDYKKMIYNLLPGP
NKMIPKVFLSSKTGVETYKPSAYILEGYKQNKHIKSSKDFDITFCHDLIDYFKNCIAIHPEWKNFGFDFSDTSTYEDISGFYRE
VELQGYKIDWTYISEKDIDLLQEKGQLYLFQIYNKDFSKKSTGNDNLHTMYLKNLFSEENLKDIVLKLNGEAEIFFRKSSIKNP
IIHKKGSILVNRTYEAEEKDQFGNIQIVRKNIPENIYQELYKYFNDKSDKELSDEAAKLKNVVGHHEAATNIVKDYRYTYDKYF
LHMPITINFKANKTGFINDRILQYIAKEKDLHVIGIDRGERNLIYVSVIDTCGNIVEQKSFNIVNGYDYQIKLKQQEGARQIAR
KEWKEIGKIKEIKEGYLSLVIHEISKMVIKYNAIIAMEDLSYGFKKGRFKVERQVYQKFETMLINKLNYLVFKDISITENGGLL
KGYQLTYIPDKLKNVGHQCGCIFYVPAAYTSKIDPTTGFVNIFKFKDLTVDAKREFIKKFDSIRYDSEKNLFCFTEDYNNFITQ
NTVMSKSSWSVYTYGVRIKRRFVNGRFSNESDTIDITKDMEKTLEMTDINWRDGHDLRQDIIDYEIVQHIFEIFRLTVQMRNSL
SELEDRDYDRLISPVLNENNIFYDSAKAGDALPKDADANGAYCIALKGLYEIKQITENWKEDGKFSRDKLKISNKDWEDFIQNK
RYL
ErCas12a-P297R-NT (SEQ ID NO: 35)
atgAATAACGGTACCAATAACTTTCAAAATTTTATCGGGATCTCCTCGTTGCAAAAAACTCTTCGTAATGCTTTAATCCCGACT
GAGACAACACAGCAGTTCATCGTTAAAAACGGCATCATTAAAGAAGATGAGCTGCGCGGCGAGAACCGTCAGATTTTAAAGGAC
ATCATGGACGACTATTACCGTGGGTTCATCTCAGAAACATTAAGCAGCATCGATGATATCGACTGGACCTCACTGTTTGAGAAG
ATGGAGATTCAACTTAAGAATGGAGACAACAAAGACACTTTAATTAAGGAGCAGACGGAATATCGTAAAGCTATCCATAAAAAA
TTTGCAAACGATGACCGTTTCAAAAATATGTTTTCCGCAAAATTGATTAGCGACATTTTACCTGAATTCGTAATCCATAACAAC
AACTATTCCGCATCTGAAAAAGAGGAGAAGACCCAAGTTATCAAACTTTTTTCACGTTTCGCGACATCTTTTAAAGACTACTTT
AAGAATCGTGCGAATTGTTTCAGTGCAGATGATATTTCGTCTAGTTCATGTCACCGTATCGTGAATGACAACGCTGAGATTTTC
TTTTCTAATGCGTTGGTGTATCGCCGCATCGTAAAGTCCTTGTCGAATGATGATATCAACAAAATTAGTGGTGACATGAAAGAC
TCCCTGAAAGAAATGTCATTAGAGGAGATTTACAGCTACGAAAAATACGGAGAGTTCATCACTCAGGAAGGTATCTCCTTTTAC
AACGATATTTGCGGCAAAGTTAATAGTTTCATGAATCTGTATTGTCAGAAGAATAAGGAAAACAAGAATCTGTACAAGTTACAA
AAGCTTCATAAACAGATCTTGTGCATCGCCGACACGTCTTATGAAGTCCGTTATAAATTTGAAAGCGACGAAGAAGTATATCAG
AGTGTGAATGGATTCTTGGACAATATCTCATCAAAACACATTGTTGAACGTTTGCGCAAAATCGGCGACAACTATAACGGATAC
AACTTGGATAAAATTTATATCGTATCAAAATTTTATGAATCAGTATCCCAAAAGACTTACCGTGATTGGGAGACTATTAATACG
GCGTTAGAAATCCATTACAACAACATTCTGCCGGGTAACGGTAAATCGAAAGCGGACAAAGTGAAGAAGGCGGTTAAGAACGAT
CTTCAGAAGTCTATCACGGAGATTAATGAGCTGGTTTCCAATTACAAGTTGTGCTCGGATGATAACATCAAAGCTGAAACCTAT
ATCCATGAAATTTCTCATATTCTTAATAACTTCGAGGCACAAGAATTAAAATATAACCCAGAAATTCATCTGGTTGAGAGCGAA
CTTAAAGCTTCAGAATTAAAAAATGTTTTGGACGTAATTATGAACGCCTTCCATTGGTGCAGCGTGTTTATGACAGAGGAGTTA
GTAGATAAGGATAACAACTTTTATGCAGAATTGGAAGAGATCTATGATGAGATCTATCCAGTGATTTCACTGTATAACTTAGTC
CGTAATTACGTCACTCAGAAGCCGTACTCAACTAAAAAGATCAAGTTAAATTTTGGAATTCCGACATTGGCGGATGGTTGGAGT
AAGTCTAAGGAATACTCAAATAACGCTATTATCTTAATGCGTGACAACCTGTATTACTTGGGTATTTTCAATGCCAAAAATAAG
CCCGATAAAAAAATCATTGAAGGGAATACTTCAGAAAATAAGGGAGATTACAAAAAAATGATTTATAACCTTTTGCCAGGCCCA
AACAAAATGATCCCCAAGGTGTTTTTGAGTAGTAAGACGGGAGTAGAAACATATAAGCCATCAGCGTACATTCTTGAAGGGTAC
AAACAAAATAAACACATCAAGAGCAGCAAGGACTTTGACATTACATTTTGTCATGACTTAATCGACTACTTTAAAAATTGCATT
GCCATTCACCCTGAGTGGAAAAATTTTGGTTTCGACTTCAGTGATACCTCTACCTATGAAGATATCTCTGGTTTTTATCGTGAG
GTAGAACTTCAGGGTTACAAGATCGATTGGACGTACATTTCCGAGAAAGACATTGATCTTTTACAAGAGAAGGGTCAGCTTTAC
TTATTTCAGATCTACAATAAAGACTTTTCGAAAAAATCCACGGGCAACGACAACCTTCATACAATGTACTTAAAGAACCTGTTC
TCTGAAGAAAACTTGAAAGATATCGTGCTTAAATTGAATGGCGAGGCCGAGATTTTTTTCCGTAAAAGCTCGATTAAGAATCCC
ATCATCCACAAGAAAGGCAGCATTCTGGTAAATCGTACCTATGAAGCGGAGGAAAAGGACCAATTTGGTAATATTCAGATTGTC
CGTAAGAACATCCCTGAAAATATCTATCAAGAATTATATAAATATTTCAACGATAAGTCGGACAAGGAACTTAGCGATGAAGCC
GCGAAGTTGAAAAATGTTGTTGGTCACCACGAAGCAGCAACAAACATTGTGAAAGACTATCGCTACACTTACGATAAGTACTTT
TTACATATGCCTATTACGATTAACTTTAAGGCAAATAAGACAGGTTTTATCAACGACCGTATCCTGCAATATATTGCAAAAGAG
AAGGACCTGCATGTCATTGGGATTGATCGCGGTGAACGCAATCTGATTTACGTGAGTGTTATTGATACCTGCGGTAATATTGTT
GAGCAAAAGTCTTTTAATATCGTTAATGGTTACGACTACCAAATTAAGCTTAAACAACAGGAAGGTGCCCGCCAGATCGCCCGT
AAGGAGTGGAAGGAAATCGGAAAAATTAAGGAAATCAAAGAGGGATATCTGAGCTTGGTTATTCATGAAATCTCAAAGATGGTT
ATTAAGTACAACGCCATCATCGCTATGGAAGACTTATCGTATGGGTTTAAAAAGGGTCGTTTCAAAGTTGAGCGCCAGGTCTAC
CAAAAGTTTGAAACGATGCTTATTAATAAATTAAACTACTTGGTTTTCAAAGATATCTCTATTACCGAGAATGGAGGTTTACTG
AAAGGATACCAGTTAACGTATATCCCCGATAAGCTTAAAAACGTGGGCCATCAGTGTGGCTGTATTTTCTATGTGCCCGCGGCA
TATACATCAAAAATTGACCCGACGACGGGTTTCGTTAATATCTTCAAGTTCAAAGATCTGACAGTTGATGCAAAACGCGAATTC
ATTAAGAAGTTCGATAGTATTCGCTATGACTCCGAGAAAAATTTGTTTTGCTTCACTTTTGACTACAATAACTTTATTACTCAG
AATACAGTCATGAGTAAAAGCTCCTGGTCGGTTTACACGTACGGGGTACGCATCAAACGTCGTTTTGTGAATGGTCGTTTTAGT
AATGAGTCGGATACAATTGATATTACCAAGGATATGGAGAAGACTCTGGAAATGACAGACATCAATTGGCGTGATGGACATGAT
TTGCGTCAGGACATTATCGACTATGAGATTGTGCAGCATATTTTCGAAATTTTTCGCCTGACGGTGCAAATGCGTAATTCCTTA
AGCGAACTGGAAGATCGCGACTATGACCGCTTAATTTCTCCTGTGCTGAATGAGAACAACATCTTCTATGACTCAGCGAAAGCC
GGGGACGCTTTGCCAAAGGATGCAGATGCTAACGGTGCATATTGTATTGCTCTGAAAGGCCTTTACGAGATCAAACAAATTACT
GAAAACTGGAAGGAAGATGGAAAGTTTTCCCGTGATAAATTGAAGATCTCTAATAAGGACTGGTTTGACTTTATCCAAAATAAA
CGTTATTTA
ErCas12a-P297R-AA (SEQ ID NO: 36)
MNNGTNNFQNFIGISSLQKTLRNALIPTETTQQFIVKNGIIKEDELRGENRQILKDIMDDYYRGFISETLSSIDDIDWTSLFEK
MEIQLKNGDNKDTLIKEQTEYRKAIHKKFANDDRFKNMFSAKLISDILPEFVIHNNNYSASEKEEKTQVIKLFSRFATSFKDYF
KNRANCFSADDISSSSCHRIVNDNAEIFFSNALVYRRIVKSLSNDDINKISGDMKDSLKEMSLEEIYSYEKYGEFITQEGISFY
NDICGKVNSFMNLYCQKNKENKNLYKLQKLHKQILCIADTSYEVRYKFESDEEVYQSVNGELDNISSKHIVERLRKIGDNYNGY
NLDKIYIVSKFYESVSQKTYRDWETINTALEIHYNNILPGNGKSKADKVKKAVKNDLQKSITEINELVSNYKLCSDDNIKAETY
IHEISHILNNFEAQELKYNPEIHLVESELKASELKNVLDVIMNAFHWCSVFMTEELVDKDNNFYAELEEIYDEIYPVISLYNLV
RNYVTQKPYSTKKIKLNFGIPTLADGWSKSKEYSNNAIILMRDNLYYLGIFNAKNKPDKKIIEGNTSENKGDYKKMIYNLLPGP
NKMIPKVFLSSKTGVETYKPSAYILEGYKQNKHIKSSKDFDITFCHDLIDYFKNCIAIHPEWKNFGFDFSDTSTYEDISGFYRE
VELQGYKIDWTYISEKDIDLLQEKGQLYLFQIYNKDFSKKSTGNDNLHTMYLKNLFSEENLKDIVLKLNGEAEIFFRKSSIKNP
IIHKKGSILVNRTYEAEEKDQFGNIQIVRKNIPENIYQELYKYFNDKSDKELSDEAAKLKNVVGHHEAATNIVKDYRYTYDKYF
LHMPITINFKANKTGFINDRILQYIAKEKDLHVIGIDRGERNLIYVSVIDTCGNIVEQKSFNIVNGYDYQIKLKQQEGARQIAR
KEWKEIGKIKEIKEGYLSLVIHEISKMVIKYNAIIAMEDLSYGFKKGRFKVERQVYQKFETMLINKLNYLVFKDISITENGGLL
KGYQLTYIPDKLKNVGHQCGCIFYVPAAYTSKIDPTTGFVNIFKFKDLTVDAKREFIKKFDSIRYDSEKNLFCFTEDYNNFITQ
NTVMSKSSWSVYTYGVRIKRRFVNGRFSNESDTIDITKDMEKTLEMTDINWRDGHDLRQDIIDYEIVQHIFEIFRLTVQMRNSL
SELEDRDYDRLISPVLNENNIFYDSAKAGDALPKDADANGAYCIALKGLYEIKQITENWKEDGKFSRDKLKISNKDWFDFIQNK
RYL
ErCas12a-P297F-NT (SEQ ID NO: 37)
atgAATAACGGTACCAATAACTTTCAAAATTTTATCGGGATCTCCTCGTTGCAAAAAACTCTTCGTAATGCTTTAATCCCGACT
GAGACAACACAGCAGTTCATCGTTAAAAACGGCATCATTAAAGAAGATGAGCTGCGCGGCGAGAACCGTCAGATTTTAAAGGAC
ATCATGGACGACTATTACCGTGGGTTCATCTCAGAAACATTAAGCAGCATCGATGATATCGACTGGACCTCACTGTTTGAGAAG
ATGGAGATTCAACTTAAGAATGGAGACAACAAAGACACTTTAATTAAGGAGCAGACGGAATATCGTAAAGCTATCCATAAAAAA
TTTGCAAACGATGACCGTTTCAAAAATATGTTTTCCGCAAAATTGATTAGCGACATTTTACCTGAATTCGTAATCCATAACAAC
AACTATTCCGCATCTGAAAAAGAGGAGAAGACCCAAGTTATCAAACTTTTTTCACGTTTCGCGACATCTTTTAAAGACTACTTT
AAGAATCGTGCGAATTGTTTCAGTGCAGATGATATTTCGTCTAGTTCATGTCACCGTATCGTGAATGACAACGCTGAGATTTTC
TTTTCTAATGCGTTGGTGTATCGCCGCATCGTAAAGTCCTTGTCGAATGATGATATCAACAAAATTAGTGGTGACATGAAAGAC
TCCCTGAAAGAAATGTCATTAGAGGAGATTTACAGCTACGAAAAATACGGAGAGTTCATCACTCAGGAAGGTATCTCCTTTTAC
AACGATATTTGCGGCAAAGTTAATAGTTTCATGAATCTGTATTGTCAGAAGAATAAGGAAAACAAGAATCTGTACAAGTTACAA
AAGCTTCATAAACAGATCTTGTGCATCGCCGACACGTCTTATGAAGTCTTTTATAAATTTGAAAGCGACGAAGAAGTATATCAG
AGTGTGAATGGATTCTTGGACAATATCTCATCAAAACACATTGTTGAACGTTTGCGCAAAATCGGCGACAACTATAACGGATAC
AACTTGGATAAAATTTATATCGTATCAAAATTTTATGAATCAGTATCCCAAAAGACTTACCGTGATTGGGAGACTATTAATACG
GCGTTAGAAATCCATTACAACAACATTCTGCCGGGTAACGGTAAATCGAAAGCGGACAAAGTGAAGAAGGCGGTTAAGAACGAT
CTTCAGAAGTCTATCACGGAGATTAATGAGCTGGTTTCCAATTACAAGTTGTGCTCGGATGATAACATCAAAGCTGAAACCTAT
ATCCATGAAATTTCTCATATTCTTAATAACTTCGAGGCACAAGAATTAAAATATAACCCAGAAATTCATCTGGTTGAGAGCGAA
CTTAAAGCTTCAGAATTAAAAAATGTTTTGGACGTAATTATGAACGCCTTCCATTGGTGCAGCGTGTTTATGACAGAGGAGTTA
GTAGATAAGGATAACAACTTTTATGCAGAATTGGAAGAGATCTATGATGAGATCTATCCAGTGATTTCACTGTATAACTTAGTC
CGTAATTACGTCACTCAGAAGCCGTACTCAACTAAAAAGATCAAGTTAAATTTTGGAATTCCGACATTGGCGGATGGTTGGAGT
AAGTCTAAGGAATACTCAAATAACGCTATTATCTTAATGCGTGACAACCTGTATTACTTGGGTATTTTCAATGCCAAAAATAAG
CCCGATAAAAAAATCATTGAAGGGAATACTTCAGAAAATAAGGGAGATTACAAAAAAATGATTTATAACCTTTTGCCAGGCCCA
AACAAAATGATCCCCAAGGTGTTTTTGAGTAGTAAGACGGGAGTAGAAACATATAAGCCATCAGCGTACATTCTTGAAGGGTAC
AAACAAAATAAACACATCAAGAGCAGCAAGGACTTTGACATTACATTTTGTCATGACTTAATCGACTACTTTAAAAATTGCATT
GCCATTCACCCTGAGTGGAAAAATTTTGGTTTCGACTTCAGTGATACCTCTACCTATGAAGATATCTCTGGTTTTTATCGTGAG
GTAGAACTTCAGGGTTACAAGATCGATTGGACGTACATTTCCGAGAAAGACATTGATCTTTTACAAGAGAAGGGTCAGCTTTAC
TTATTTCAGATCTACAATAAAGACTTTTCGAAAAAATCCACGGGCAACGACAACCTTCATACAATGTACTTAAAGAACCTGTTC
TCTGAAGAAAACTTGAAAGATATCGTGCTTAAATTGAATGGCGAGGCCGAGATTTTTTTCCGTAAAAGCTCGATTAAGAATCCC
ATCATCCACAAGAAAGGCAGCATTCTGGTAAATCGTACCTATGAAGCGGAGGAAAAGGACCAATTTGGTAATATTCAGATTGTC
CGTAAGAACATCCCTGAAAATATCTATCAAGAATTATATAAATATTTCAACGATAAGTCGGACAAGGAACTTAGCGATGAAGCC
GCGAAGTTGAAAAATGTTGTTGGTCACCACGAAGCAGCAACAAACATTGTGAAAGACTATCGCTACACTTACGATAAGTACTTT
TTACATATGCCTATTACGATTAACTTTAAGGCAAATAAGACAGGTTTTATCAACGACCGTATCCTGCAATATATTGCAAAAGAG
AAGGACCTGCATGTCATTGGGATTGATCGCGGTGAACGCAATCTGATTTACGTGAGTGTTATTGATACCTGCGGTAATATTGTT
GAGCAAAAGTCTTTTAATATCGTTAATGGTTACGACTACCAAATTAAGCTTAAACAACAGGAAGGTGCCCGCCAGATCGCCCGT
AAGGAGTGGAAGGAAATCGGAAAAATTAAGGAAATCAAAGAGGGATATCTGAGCTTGGTTATTCATGAAATCTCAAAGATGGTT
ATTAAGTACAACGCCATCATCGCTATGGAAGACTTATCGTATGGGTTTAAAAAGGGTCGTTTCAAAGTTGAGCGCCAGGTCTAC
CAAAAGTTTGAAACGATGCTTATTAATAAATTAAACTACTTGGTTTTCAAAGATATCTCTATTACCGAGAATGGAGGTTTACTG
AAAGGATACCAGTTAACGTATATCCCCGATAAGCTTAAAAACGTGGGCCATCAGTGTGGCTGTATTTTCTATGTGCCCGCGGCA
TATACATCAAAAATTGACCCGACGACGGGTTTCGTTAATATCTTCAAGTTCAAAGATCTGACAGTTGATGCAAAACGCGAATTC
ATTAAGAAGTTCGATAGTATTCGCTATGACTCCGAGAAAAATTTGTTTTGCTTCACTTTTGACTACAATAACTTTATTACTCAG
AATACAGTCATGAGTAAAAGCTCCTGGTCGGTTTACACGTACGGGGTACGCATCAAACGTCGTTTTGTGAATGGTCGTTTTAGT
AATGAGTCGGATACAATTGATATTACCAAGGATATGGAGAAGACTCTGGAAATGACAGACATCAATTGGCGTGATGGACATGAT
TTGCGTCAGGACATTATCGACTATGAGATTGTGCAGCATATTTTCGAAATTTTTCGCCTGACGGTGCAAATGCGTAATTCCTTA
AGCGAACTGGAAGATCGCGACTATGACCGCTTAATTTCTCCTGTGCTGAATGAGAACAACATCTTCTATGACTCAGCGAAAGCC
GGGGACGCTTTGCCAAAGGATGCAGATGCTAACGGTGCATATTGTATTGCTCTGAAAGGCCTTTACGAGATCAAACAAATTACT
GAAAACTGGAAGGAAGATGGAAAGTTTTCCCGTGATAAATTGAAGATCTCTAATAAGGACTGGTTTGACTTTATCCAAAATAAA
CGTTATTTA
ErCas12a-P297F-AA (SEQ ID NO: 38)
MNNGTNNFQNFIGISSLQKTLRNALIPTETTQQFIVKNGIIKEDELRGENRQILKDIMDDYYRGFISETLSSIDDIDWTSLFEK
MEIQLKNGDNKDTLIKEQTEYRKAIHKKFANDDRFKNMESAKLISDILPEFVIHNNNYSASEKEEKTQVIKLFSRFATSFKDYF
KNRANCFSADDISSSSCHRIVNDNAEIFFSNALVYRRIVKSLSNDDINKISGDMKDSLKEMSLEEIYSYEKYGEFITQEGISFY
NDICGKVNSFMNLYCQKNKENKNLYKLQKLHKQILCIADTSYEVFYKFESDEEVYQSVNGELDNISSKHIVERLRKIGDNYNGY
NLDKIYIVSKFYESVSQKTYRDWETINTALEIHYNNILPGNGKSKADKVKKAVKNDLQKSITEINELVSNYKLCSDDNIKAETY
IHEISHILNNFEAQELKYNPEIHLVESELKASELKNVLDVIMNAFHWCSVFMTEELVDKDNNFYAELEEIYDEIYPVISLYNLV
RNYVTQKPYSTKKIKLNFGIPTLADGWSKSKEYSNNAIILMRDNLYYLGIFNAKNKPDKKIIEGNTSENKGDYKKMIYNLLPGP
NKMIPKVFLSSKTGVETYKPSAYILEGYKQNKHIKSSKDFDITFCHDLIDYFKNCIAIHPEWKNFGFDESDTSTYEDISGFYRE
VELQGYKIDWTYISEKDIDLLQEKGQLYLFQIYNKDFSKKSTGNDNLHTMYLKNLFSEENLKDIVLKLNGEAEIFFRKSSIKNP
IIHKKGSILVNRTYEAEEKDQFGNIQIVRKNIPENIYQELYKYFNDKSDKELSDEAAKLKNVVGHHEAATNIVKDYRYTYDKYF
LHMPITINFKANKTGFINDRILQYIAKEKDLHVIGIDRGERNLIYVSVIDTCGNIVEQKSFNIVNGYDYQIKLKQQEGARQIAR
KEWKEIGKIKEIKEGYLSLVIHEISKMVIKYNAIIAMEDLSYGFKKGRFKVERQVYQKFETMLINKLNYLVFKDISITENGGLL
KGYQLTYIPDKLKNVGHQCGCIFYVPAAYTSKIDPTTGFVNIFKFKDLTVDAKREFIKKFDSIRYDSEKNLFCFTFDYNNFITQ
NTVMSKSSWSVYTYGVRIKRRFVNGRFSNESDTIDITKDMEKTLEMTDINWRDGHDLRQDIIDYEIVQHIFEIFRLTVQMRNSL
SELEDRDYDRLISPVLNENNIFYDSAKAGDALPKDADANGAYCIALKGLYEIKQITENWKEDGKFSRDKLKISNKDWFDFIQNK
RYL
ErCas12a-D303R-NT (SEQ ID NO: 39)
atgAATAACGGTACCAATAACTTTCAAAATTTTATCGGGATCTCCTCGTTGCAAAAAACTCTTCGTAATGCTTTAATCCCGACT
GAGACAACACAGCAGTTCATCGTTAAAAACGGCATCATTAAAGAAGATGAGCTGCGCGGCGAGAACCGTCAGATTTTAAAGGAC
ATCATGGACGACTATTACCGTGGGTTCATCTCAGAAACATTAAGCAGCATCGATGATATCGACTGGACCTCACTGTTTGAGAAG
ATGGAGATTCAACTTAAGAATGGAGACAACAAAGACACTTTAATTAAGGAGCAGACGGAATATCGTAAAGCTATCCATAAAAAA
TTTGCAAACGATGACCGTTTCAAAAATATGTTTTCCGCAAAATTGATTAGCGACATTTTACCTGAATTCGTAATCCATAACAAC
AACTATTCCGCATCTGAAAAAGAGGAGAAGACCCAAGTTATCAAACTTTTTTCACGTTTCGCGACATCTTTTAAAGACTACTTT
AAGAATCGTGCGAATTGTTTCAGTGCAGATGATATTTCGTCTAGTTCATGTCACCGTATCGTGAATGACAACGCTGAGATTTTC
TTTTCTAATGCGTTGGTGTATCGCCGCATCGTAAAGTCCTTGTCGAATGATGATATCAACAAAATTAGTGGTGACATGAAAGAC
TCCCTGAAAGAAATGTCATTAGAGGAGATTTACAGCTACGAAAAATACGGAGAGTTCATCACTCAGGAAGGTATCTCCTTTTAC
AACGATATTTGCGGCAAAGTTAATAGTTTCATGAATCTGTATTGTCAGAAGAATAAGGAAAACAAGAATCTGTACAAGTTACAA
AAGCTTCATAAACAGATCTTGTGCATCGCCGACACGTCTTATGAAGTCCCGTATAAATTTGAAAGCCGTGAAGAAGTATATCAG
AGTGTGAATGGATTCTTGGACAATATCTCATCAAAACACATTGTTGAACGTTTGCGCAAAATCGGCGACAACTATAACGGATAC
AACTTGGATAAAATTTATATCGTATCAAAATTTTATGAATCAGTATCCCAAAAGACTTACCGTGATTGGGAGACTATTAATACG
GCGTTAGAAATCCATTACAACAACATTCTGCCGGGTAACGGTAAATCGAAAGCGGACAAAGTGAAGAAGGCGGTTAAGAACGAT
CTTCAGAAGTCTATCACGGAGATTAATGAGCTGGTTTCCAATTACAAGTTGTGCTCGGATGATAACATCAAAGCTGAAACCTAT
ATCCATGAAATTTCTCATATTCTTAATAACTTCGAGGCACAAGAATTAAAATATAACCCAGAAATTCATCTGGTTGAGAGCGAA
CTTAAAGCTTCAGAATTAAAAAATGTTTTGGACGTAATTATGAACGCCTTCCATTGGTGCAGCGTGTTTATGACAGAGGAGTTA
GTAGATAAGGATAACAACTTTTATGCAGAATTGGAAGAGATCTATGATGAGATCTATCCAGTGATTTCACTGTATAACTTAGTC
CGTAATTACGTCACTCAGAAGCCGTACTCAACTAAAAAGATCAAGTTAAATTTTGGAATTCCGACATTGGCGGATGGTTGGAGT
AAGTCTAAGGAATACTCAAATAACGCTATTATCTTAATGCGTGACAACCTGTATTACTTGGGTATTTTCAATGCCAAAAATAAG
CCCGATAAAAAAATCATTGAAGGGAATACTTCAGAAAATAAGGGAGATTACAAAAAAATGATTTATAACCTTTTGCCAGGCCCA
AACAAAATGATCCCCAAGGTGTTTTTGAGTAGTAAGACGGGAGTAGAAACATATAAGCCATCAGCGTACATTCTTGAAGGGTAC
AAACAAAATAAACACATCAAGAGCAGCAAGGACTTTGACATTACATTTTGTCATGACTTAATCGACTACTTTAAAAATTGCATT
GCCATTCACCCTGAGTGGAAAAATTTTGGTTTCGACTTCAGTGATACCTCTACCTATGAAGATATCTCTGGTTTTTATCGTGAG
GTAGAACTTCAGGGTTACAAGATCGATTGGACGTACATTTCCGAGAAAGACATTGATCTTTTACAAGAGAAGGGTCAGCTTTAC
TTATTTCAGATCTACAATAAAGACTTTTCGAAAAAATCCACGGGCAACGACAACCTTCATACAATGTACTTAAAGAACCTGTTC
TCTGAAGAAAACTTGAAAGATATCGTGCTTAAATTGAATGGCGAGGCCGAGATTTTTTTCCGTAAAAGCTCGATTAAGAATCCC
ATCATCCACAAGAAAGGCAGCATTCTGGTAAATCGTACCTATGAAGCGGAGGAAAAGGACCAATTTGGTAATATTCAGATTGTC
CGTAAGAACATCCCTGAAAATATCTATCAAGAATTATATAAATATTTCAACGATAAGTCGGACAAGGAACTTAGCGATGAAGCC
GCGAAGTTGAAAAATGTTGTTGGTCACCACGAAGCAGCAACAAACATTGTGAAAGACTATCGCTACACTTACGATAAGTACTTT
TTACATATGCCTATTACGATTAACTTTAAGGCAAATAAGACAGGTTTTATCAACGACCGTATCCTGCAATATATTGCAAAAGAG
AAGGACCTGCATGTCATTGGGATTGATCGCGGTGAACGCAATCTGATTTACGTGAGTGTTATTGATACCTGCGGTAATATTGTT
GAGCAAAAGTCTTTTAATATCGTTAATGGTTACGACTACCAAATTAAGCTTAAACAACAGGAAGGTGCCCGCCAGATCGCCCGT
AAGGAGTGGAAGGAAATCGGAAAAATTAAGGAAATCAAAGAGGGATATCTGAGCTTGGTTATTCATGAAATCTCAAAGATGGTT
ATTAAGTACAACGCCATCATCGCTATGGAAGACTTATCGTATGGGTTTAAAAAGGGTCGTTTCAAAGTTGAGCGCCAGGTCTAC
CAAAAGTTTGAAACGATGCTTATTAATAAATTAAACTACTTGGTTTTCAAAGATATCTCTATTACCGAGAATGGAGGTTTACTG
AAAGGATACCAGTTAACGTATATCCCCGATAAGCTTAAAAACGTGGGCCATCAGTGTGGCTGTATTTTCTATGTGCCCGCGGCA
TATACATCAAAAATTGACCCGACGACGGGTTTCGTTAATATCTTCAAGTTCAAAGATCTGACAGTTGATGCAAAACGCGAATTC
ATTAAGAAGTTCGATAGTATTCGCTATGACTCCGAGAAAAATTTGTTTTGCTTCACTTTTGACTACAATAACTTTATTACTCAG
AATACAGTCATGAGTAAAAGCTCCTGGTCGGTTTACACGTACGGGGTACGCATCAAACGTCGTTTTGTGAATGGTCGTTTTAGT
AATGAGTCGGATACAATTGATATTACCAAGGATATGGAGAAGACTCTGGAAATGACAGACATCAATTGGCGTGATGGACATGAT
TTGCGTCAGGACATTATCGACTATGAGATTGTGCAGCATATTTTCGAAATTTTTCGCCTGACGGTGCAAATGCGTAATTCCTTA
AGCGAACTGGAAGATCGCGACTATGACCGCTTAATTTCTCCTGTGCTGAATGAGAACAACATCTTCTATGACTCAGCGAAAGCC
GGGGACGCTTTGCCAAAGGATGCAGATGCTAACGGTGCATATTGTATTGCTCTGAAAGGCCTTTACGAGATCAAACAAATTACT
GAAAACTGGAAGGAAGATGGAAAGTTTTCCCGTGATAAATTGAAGATCTCTAATAAGGACTGGTTTGACTTTATCCAAAATAAA
CGTTATTTA
ErCas12a-D303R-AA (SEQ ID NO: 40)
MNNGTNNFQNFIGISSLQKTLRNALIPTETTQQFIVKNGIIKEDELRGENRQILKDIMDDYYRGFISETLSSIDDIDWTSLFEK
MEIQLKNGDNKDTLIKEQTEYRKAIHKKFANDDRFKNMESAKLISDILPEFVIHNNNYSASEKEEKTQVIKLFSRFATSFKDYF
KNRANCFSADDISSSSCHRIVNDNAEIFFSNALVYRRIVKSLSNDDINKISGDMKDSLKEMSLEEIYSYEKYGEFITQEGISFY
NDICGKVNSFMNLYCQKNKENKNLYKLQKLHKQILCIADTSYEVPYKFESREEVYQSVNGELDNISSKHIVERLRKIGDNYNGY
NLDKIYIVSKFYESVSQKTYRDWETINTALEIHYNNILPGNGKSKADKVKKAVKNDLQKSITEINELVSNYKLCSDDNIKAETY
IHEISHILNNFEAQELKYNPEIHLVESELKASELKNVLDVIMNAFHWCSVFMTEELVDKDNNFYAELEEIYDEIYPVISLYNLV
RNYVTQKPYSTKKIKLNFGIPTLADGWSKSKEYSNNAIILMRDNLYYLGIFNAKNKPDKKIIEGNTSENKGDYKKMIYNLLPGP
NKMIPKVFLSSKTGVETYKPSAYILEGYKQNKHIKSSKDFDITFCHDLIDYFKNCIAIHPEWKNFGFDFSDTSTYEDISGFYRE
VELQGYKIDWTYISEKDIDLLQEKGQLYLFQIYNKDFSKKSTGNDNLHTMYLKNLFSEENLKDIVLKLNGEAEIFFRKSSIKNP
IIHKKGSILVNRTYEAEEKDQFGNIQIVRKNIPENIYQELYKYFNDKSDKELSDEAAKLKNVVGHHEAATNIVKDYRYTYDKYF
LHMPITINFKANKTGFINDRILQYIAKEKDLHVIGIDRGERNLIYVSVIDTCGNIVEQKSFNIVNGYDYQIKLKQQEGARQIAR
KEWKEIGKIKEIKEGYLSLVIHEISKMVIKYNAIIAMEDLSYGFKKGRFKVERQVYQKFETMLINKLNYLVFKDISITENGGLL
KGYQLTYIPDKLKNVGHQCGCIFYVPAAYTSKIDPTTGFVNIFKFKDLTVDAKREFIKKFDSIRYDSEKNLFCFTFDYNNFITQ
NTVMSKSSWSVYTYGVRIKRRFVNGRFSNESDTIDITKDMEKTLEMTDINWRDGHDLRQDIIDYEIVQHIFEIFRLTVQMRNSL
SELEDRDYDRLISPVLNENNIFYDSAKAGDALPKDADANGAYCIALKGLYEIKQITENWKEDGKFSRDKLKISNKDWFDFIQNK
RYL
ErCas12a-D303C-NT (SEQ ID NO: 41)
atgAATAACGGTACCAATAACTTTCAAAATTTTATCGGGATCTCCTCGTTGCAAAAAACTCTTCGTAATGCTTTAATCCCGACT
GAGACAACACAGCAGTTCATCGTTAAAAACGGCATCATTAAAGAAGATGAGCTGCGCGGCGAGAACCGTCAGATTTTAAAGGAC
ATCATGGACGACTATTACCGTGGGTTCATCTCAGAAACATTAAGCAGCATCGATGATATCGACTGGACCTCACTGTTTGAGAAG
ATGGAGATTCAACTTAAGAATGGAGACAACAAAGACACTTTAATTAAGGAGCAGACGGAATATCGTAAAGCTATCCATAAAAAA
TTTGCAAACGATGACCGTTTCAAAAATATGTTTTCCGCAAAATTGATTAGCGACATTTTACCTGAATTCGTAATCCATAACAAC
AACTATTCCGCATCTGAAAAAGAGGAGAAGACCCAAGTTATCAAACTTTTTTCACGTTTCGCGACATCTTTTAAAGACTACTTT
AAGAATCGTGCGAATTGTTTCAGTGCAGATGATATTTCGTCTAGTTCATGTCACCGTATCGTGAATGACAACGCTGAGATTTTC
TTTTCTAATGCGTTGGTGTATCGCCGCATCGTAAAGTCCTTGTCGAATGATGATATCAACAAAATTAGTGGTGACATGAAAGAC
TCCCTGAAAGAAATGTCATTAGAGGAGATTTACAGCTACGAAAAATACGGAGAGTTCATCACTCAGGAAGGTATCTCCTTTTAC
AACGATATTTGCGGCAAAGTTAATAGTTTCATGAATCTGTATTGTCAGAAGAATAAGGAAAACAAGAATCTGTACAAGTTACAA
AAGCTTCATAAACAGATCTTGTGCATCGCCGACACGTCTTATGAAGTCCCGTATAAATTTGAAAGCTGCGAAGAAGTATATCAG
AGTGTGAATGGATTCTTGGACAATATCTCATCAAAACACATTGTTGAACGTTTGCGCAAAATCGGCGACAACTATAACGGATAC
AACTTGGATAAAATTTATATCGTATCAAAATTTTATGAATCAGTATCCCAAAAGACTTACCGTGATTGGGAGACTATTAATACG
GCGTTAGAAATCCATTACAACAACATTCTGCCGGGTAACGGTAAATCGAAAGCGGACAAAGTGAAGAAGGCGGTTAAGAACGAT
CTTCAGAAGTCTATCACGGAGATTAATGAGCTGGTTTCCAATTACAAGTTGTGCTCGGATGATAACATCAAAGCTGAAACCTAT
ATCCATGAAATTTCTCATATTCTTAATAACTTCGAGGCACAAGAATTAAAATATAACCCAGAAATTCATCTGGTTGAGAGCGAA
CTTAAAGCTTCAGAATTAAAAAATGTTTTGGACGTAATTATGAACGCCTTCCATTGGTGCAGCGTGTTTATGACAGAGGAGTTA
GTAGATAAGGATAACAACTTTTATGCAGAATTGGAAGAGATCTATGATGAGATCTATCCAGTGATTTCACTGTATAACTTAGTC
CGTAATTACGTCACTCAGAAGCCGTACTCAACTAAAAAGATCAAGTTAAATTTTGGAATTCCGACATTGGCGGATGGTTGGAGT
AAGTCTAAGGAATACTCAAATAACGCTATTATCTTAATGCGTGACAACCTGTATTACTTGGGTATTTTCAATGCCAAAAATAAG
CCCGATAAAAAAATCATTGAAGGGAATACTTCAGAAAATAAGGGAGATTACAAAAAAATGATTTATAACCTTTTGCCAGGCCCA
AACAAAATGATCCCCAAGGTGTTTTTGAGTAGTAAGACGGGAGTAGAAACATATAAGCCATCAGCGTACATTCTTGAAGGGTAC
AAACAAAATAAACACATCAAGAGCAGCAAGGACTTTGACATTACATTTTGTCATGACTTAATCGACTACTTTAAAAATTGCATT
GCCATTCACCCTGAGTGGAAAAATTTTGGTTTCGACTTCAGTGATACCTCTACCTATGAAGATATCTCTGGTTTTTATCGTGAG
GTAGAACTTCAGGGTTACAAGATCGATTGGACGTACATTTCCGAGAAAGACATTGATCTTTTACAAGAGAAGGGTCAGCTTTAC
TTATTTCAGATCTACAATAAAGACTTTTCGAAAAAATCCACGGGCAACGACAACCTTCATACAATGTACTTAAAGAACCTGTTC
TCTGAAGAAAACTTGAAAGATATCGTGCTTAAATTGAATGGCGAGGCCGAGATTTTTTTCCGTAAAAGCTCGATTAAGAATCCC
ATCATCCACAAGAAAGGCAGCATTCTGGTAAATCGTACCTATGAAGCGGAGGAAAAGGACCAATTTGGTAATATTCAGATTGTC
CGTAAGAACATCCCTGAAAATATCTATCAAGAATTATATAAATATTTCAACGATAAGTCGGACAAGGAACTTAGCGATGAAGCC
GCGAAGTTGAAAAATGTTGTTGGTCACCACGAAGCAGCAACAAACATTGTGAAAGACTATCGCTACACTTACGATAAGTACTTT
TTACATATGCCTATTACGATTAACTTTAAGGCAAATAAGACAGGTTTTATCAACGACCGTATCCTGCAATATATTGCAAAAGAG
AAGGACCTGCATGTCATTGGGATTGATCGCGGTGAACGCAATCTGATTTACGTGAGTGTTATTGATACCTGCGGTAATATTGTT
GAGCAAAAGTCTTTTAATATCGTTAATGGTTACGACTACCAAATTAAGCTTAAACAACAGGAAGGTGCCCGCCAGATCGCCCGT
AAGGAGTGGAAGGAAATCGGAAAAATTAAGGAAATCAAAGAGGGATATCTGAGCTTGGTTATTCATGAAATCTCAAAGATGGTT
ATTAAGTACAACGCCATCATCGCTATGGAAGACTTATCGTATGGGTTTAAAAAGGGTCGTTTCAAAGTTGAGCGCCAGGTCTAC
CAAAAGTTTGAAACGATGCTTATTAATAAATTAAACTACTTGGTTTTCAAAGATATCTCTATTACCGAGAATGGAGGTTTACTG
AAAGGATACCAGTTAACGTATATCCCCGATAAGCTTAAAAACGTGGGCCATCAGTGTGGCTGTATTTTCTATGTGCCCGCGGCA
TATACATCAAAAATTGACCCGACGACGGGTTTCGTTAATATCTTCAAGTTCAAAGATCTGACAGTTGATGCAAAACGCGAATTC
ATTAAGAAGTTCGATAGTATTCGCTATGACTCCGAGAAAAATTTGTTTTGCTTCACTTTTGACTACAATAACTTTATTACTCAG
AATACAGTCATGAGTAAAAGCTCCTGGTCGGTTTACACGTACGGGGTACGCATCAAACGTCGTTTTGTGAATGGTCGTTTTAGT
AATGAGTCGGATACAATTGATATTACCAAGGATATGGAGAAGACTCTGGAAATGACAGACATCAATTGGCGTGATGGACATGAT
TTGCGTCAGGACATTATCGACTATGAGATTGTGCAGCATATTTTCGAAATTTTTCGCCTGACGGTGCAAATGCGTAATTCCTTA
AGCGAACTGGAAGATCGCGACTATGACCGCTTAATTTCTCCTGTGCTGAATGAGAACAACATCTTCTATGACTCAGCGAAAGCC
GGGGACGCTTTGCCAAAGGATGCAGATGCTAACGGTGCATATTGTATTGCTCTGAAAGGCCTTTACGAGATCAAACAAATTACT
GAAAACTGGAAGGAAGATGGAAAGTTTTCCCGTGATAAATTGAAGATCTCTAATAAGGACTGGTTTGACTTTATCCAAAATAAA
CGTTATTTA
ErCas12a-D303C-AA (SEQ ID NO: 42)
MNNGTNNFQNFIGISSLQKTLRNALIPTETTQQFIVKNGIIKEDELRGENRQILKDIMDDYYRGFISETLSSIDDIDWTSLFEK
MEIQLKNGDNKDTLIKEQTEYRKAIHKKFANDDRFKNMFSAKLISDILPEFVIHNNNYSASEKEEKTQVIKLFSRFATSFKDYF
KNRANCESADDISSSSCHRIVNDNAEIFFSNALVYRRIVKSLSNDDINKISGDMKDSLKEMSLEEIYSYEKYGEFITQEGISFY
NDICGKVNSFMNLYCQKNKENKNLYKLQKLHKQILCIADTSYEVPYKFESCEEVYQSVNGFLDNISSKHIVERLRKIGDNYNGY
NLDKIYIVSKFYESVSQKTYRDWETINTALEIHYNNILPGNGKSKADKVKKAVKNDLQKSITEINELVSNYKLCSDDNIKAETY
IHEISHILNNFEAQELKYNPEIHLVESELKASELKNVLDVIMNAFHWCSVFMTEELVDKDNNFYAELEEIYDEIYPVISLYNLV
RNYVTQKPYSTKKIKLNFGIPTLADGWSKSKEYSNNAIILMRDNLYYLGIFNAKNKPDKKIIEGNTSENKGDYKKMIYNLLPGP
NKMIPKVFLSSKTGVETYKPSAYILEGYKQNKHIKSSKDFDITFCHDLIDYFKNCIAIHPEWKNFGFDFSDTSTYEDISGFYRE
VELQGYKIDWTYISEKDIDLLQEKGQLYLFQIYNKDFSKKSTGNDNLHTMYLKNLFSEENLKDIVLKLNGEAEIFFRKSSIKNP
IIHKKGSILVNRTYEAEEKDQFGNIQIVRKNIPENIYQELYKYFNDKSDKELSDEAAKLKNVVGHHEAATNIVKDYRYTYDKYF
LHMPITINFKANKTGFINDRILQYIAKEKDLHVIGIDRGERNLIYVSVIDTCGNIVEQKSFNIVNGYDYQIKLKQQEGARQIAR
KEWKEIGKIKEIKEGYLSLVIHEISKMVIKYNAIIAMEDLSYGFKKGRFKVERQVYQKFETMLINKLNYLVFKDISITENGGLL
KGYQLTYIPDKLKNVGHQCGCIFYVPAAYTSKIDPTTGFVNIFKFKDLTVDAKREFIKKFDSIRYDSEKNLFCFTEDYNNFITQ
NTVMSKSSWSVYTYGVRIKRRFVNGRFSNESDTIDITKDMEKTLEMTDINWRDGHDLRQDIIDYEIVQHIFEIFRLTVQMRNSL
SELEDRDYDRLISPVLNENNIFYDSAKAGDALPKDADANGAYCIALKGLYEIKQITENWKEDGKFSRDKLKISNKDWEDFIQNK
RYL
ErCas12a-E305K-NT (SEQ ID NO: 43)
atgAATAACGGTACCAATAACTTTCAAAATTTTATCGGGATCTCCTCGTTGCAAAAAACTCTTCGTAATGCTTTAATCCCGACT
GAGACAACACAGCAGTTCATCGTTAAAAACGGCATCATTAAAGAAGATGAGCTGCGCGGCGAGAACCGTCAGATTTTAAAGGAC
ATCATGGACGACTATTACCGTGGGTTCATCTCAGAAACATTAAGCAGCATCGATGATATCGACTGGACCTCACTGTTTGAGAAG
ATGGAGATTCAACTTAAGAATGGAGACAACAAAGACACTTTAATTAAGGAGCAGACGGAATATCGTAAAGCTATCCATAAAAAA
TTTGCAAACGATGACCGTTTCAAAAATATGTTTTCCGCAAAATTGATTAGCGACATTTTACCTGAATTCGTAATCCATAACAAC
AACTATTCCGCATCTGAAAAAGAGGAGAAGACCCAAGTTATCAAACTTTTTTCACGTTTCGCGACATCTTTTAAAGACTACTTT
AAGAATCGTGCGAATTGTTTCAGTGCAGATGATATTTCGTCTAGTTCATGTCACCGTATCGTGAATGACAACGCTGAGATTTTC
TTTTCTAATGCGTTGGTGTATCGCCGCATCGTAAAGTCCTTGTCGAATGATGATATCAACAAAATTAGTGGTGACATGAAAGAC
TCCCTGAAAGAAATGTCATTAGAGGAGATTTACAGCTACGAAAAATACGGAGAGTTCATCACTCAGGAAGGTATCTCCTTTTAC
AACGATATTTGCGGCAAAGTTAATAGTTTCATGAATCTGTATTGTCAGAAGAATAAGGAAAACAAGAATCTGTACAAGTTACAA
AAGCTTCATAAACAGATCTTGTGCATCGCCGACACGTCTTATGAAGTCCCGTATAAATTTGAAAGCGACGAAAAAGTATATCAG
AGTGTGAATGGATTCTTGGACAATATCTCATCAAAACACATTGTTGAACGTTTGCGCAAAATCGGCGACAACTATAACGGATAC
AACTTGGATAAAATTTATATCGTATCAAAATTTTATGAATCAGTATCCCAAAAGACTTACCGTGATTGGGAGACTATTAATACG
GCGTTAGAAATCCATTACAACAACATTCTGCCGGGTAACGGTAAATCGAAAGCGGACAAAGTGAAGAAGGCGGTTAAGAACGAT
CTTCAGAAGTCTATCACGGAGATTAATGAGCTGGTTTCCAATTACAAGTTGTGCTCGGATGATAACATCAAAGCTGAAACCTAT
ATCCATGAAATTTCTCATATTCTTAATAACTTCGAGGCACAAGAATTAAAATATAACCCAGAAATTCATCTGGTTGAGAGCGAA
CTTAAAGCTTCAGAATTAAAAAATGTTTTGGACGTAATTATGAACGCCTTCCATTGGTGCAGCGTGTTTATGACAGAGGAGTTA
GTAGATAAGGATAACAACTTTTATGCAGAATTGGAAGAGATCTATGATGAGATCTATCCAGTGATTTCACTGTATAACTTAGTC
CGTAATTACGTCACTCAGAAGCCGTACTCAACTAAAAAGATCAAGTTAAATTTTGGAATTCCGACATTGGCGGATGGTTGGAGT
AAGTCTAAGGAATACTCAAATAACGCTATTATCTTAATGCGTGACAACCTGTATTACTTGGGTATTTTCAATGCCAAAAATAAG
CCCGATAAAAAAATCATTGAAGGGAATACTTCAGAAAATAAGGGAGATTACAAAAAAATGATTTATAACCTTTTGCCAGGCCCA
AACAAAATGATCCCCAAGGTGTTTTTGAGTAGTAAGACGGGAGTAGAAACATATAAGCCATCAGCGTACATTCTTGAAGGGTAC
AAACAAAATAAACACATCAAGAGCAGCAAGGACTTTGACATTACATTTTGTCATGACTTAATCGACTACTTTAAAAATTGCATT
GCCATTCACCCTGAGTGGAAAAATTTTGGTTTCGACTTCAGTGATACCTCTACCTATGAAGATATCTCTGGTTTTTATCGTGAG
GTAGAACTTCAGGGTTACAAGATCGATTGGACGTACATTTCCGAGAAAGACATTGATCTTTTACAAGAGAAGGGTCAGCTTTAC
TTATTTCAGATCTACAATAAAGACTTTTCGAAAAAATCCACGGGCAACGACAACCTTCATACAATGTACTTAAAGAACCTGTTC
TCTGAAGAAAACTTGAAAGATATCGTGCTTAAATTGAATGGCGAGGCCGAGATTTTTTTCCGTAAAAGCTCGATTAAGAATCCC
ATCATCCACAAGAAAGGCAGCATTCTGGTAAATCGTACCTATGAAGCGGAGGAAAAGGACCAATTTGGTAATATTCAGATTGTC
CGTAAGAACATCCCTGAAAATATCTATCAAGAATTATATAAATATTTCAACGATAAGTCGGACAAGGAACTTAGCGATGAAGCC
GCGAAGTTGAAAAATGTTGTTGGTCACCACGAAGCAGCAACAAACATTGTGAAAGACTATCGCTACACTTACGATAAGTACTTT
TTACATATGCCTATTACGATTAACTTTAAGGCAAATAAGACAGGTTTTATCAACGACCGTATCCTGCAATATATTGCAAAAGAG
AAGGACCTGCATGTCATTGGGATTGATCGCGGTGAACGCAATCTGATTTACGTGAGTGTTATTGATACCTGCGGTAATATTGTT
GAGCAAAAGTCTTTTAATATCGTTAATGGTTACGACTACCAAATTAAGCTTAAACAACAGGAAGGTGCCCGCCAGATCGCCCGT
AAGGAGTGGAAGGAAATCGGAAAAATTAAGGAAATCAAAGAGGGATATCTGAGCTTGGTTATTCATGAAATCTCAAAGATGGTT
ATTAAGTACAACGCCATCATCGCTATGGAAGACTTATCGTATGGGTTTAAAAAGGGTCGTTTCAAAGTTGAGCGCCAGGTCTAC
CAAAAGTTTGAAACGATGCTTATTAATAAATTAAACTACTTGGTTTTCAAAGATATCTCTATTACCGAGAATGGAGGTTTACTG
AAAGGATACCAGTTAACGTATATCCCCGATAAGCTTAAAAACGTGGGCCATCAGTGTGGCTGTATTTTCTATGTGCCCGCGGCA
TATACATCAAAAATTGACCCGACGACGGGTTTCGTTAATATCTTCAAGTTCAAAGATCTGACAGTTGATGCAAAACGCGAATTC
ATTAAGAAGTTCGATAGTATTCGCTATGACTCCGAGAAAAATTTGTTTTGCTTCACTTTTGACTACAATAACTTTATTACTCAG
AATACAGTCATGAGTAAAAGCTCCTGGTCGGTTTACACGTACGGGGTACGCATCAAACGTCGTTTTGTGAATGGTCGTTTTAGT
AATGAGTCGGATACAATTGATATTACCAAGGATATGGAGAAGACTCTGGAAATGACAGACATCAATTGGCGTGATGGACATGAT
TTGCGTCAGGACATTATCGACTATGAGATTGTGCAGCATATTTTCGAAATTTTTCGCCTGACGGTGCAAATGCGTAATTCCTTA
AGCGAACTGGAAGATCGCGACTATGACCGCTTAATTTCTCCTGTGCTGAATGAGAACAACATCTTCTATGACTCAGCGAAAGCC
GGGGACGCTTTGCCAAAGGATGCAGATGCTAACGGTGCATATTGTATTGCTCTGAAAGGCCTTTACGAGATCAAACAAATTACT
GAAAACTGGAAGGAAGATGGAAAGTTTTCCCGTGATAAATTGAAGATCTCTAATAAGGACTGGTTTGACTTTATCCAAAATAAA
CGTTATTTA
ErCas12a-E305K-AA (SEQ ID NO: 44)
MNNGTNNFQNFIGISSLQKTLRNALIPTETTQQFIVKNGIIKEDELRGENRQILKDIMDDYYRGFISETLSSIDDIDWTSLFEK
MEIQLKNGDNKDTLIKEQTEYRKAIHKKFANDDRFKNMFSAKLISDILPEFVIHNNNYSASEKEEKTQVIKLFSRFATSFKDYF
KNRANCFSADDISSSSCHRIVNDNAEIFFSNALVYRRIVKSLSNDDINKISGDMKDSLKEMSLEEIYSYEKYGEFITQEGISFY
NDICGKVNSFMNLYCQKNKENKNLYKLQKLHKQILCIADTSYEVPYKFESDEKVYQSVNGELDNISSKHIVERLRKIGDNYNGY
NLDKIYIVSKFYESVSQKTYRDWETINTALEIHYNNILPGNGKSKADKVKKAVKNDLQKSITEINELVSNYKLCSDDNIKAETY
IHEISHILNNFEAQELKYNPEIHLVESELKASELKNVLDVIMNAFHWCSVFMTEELVDKDNNFYAELEEIYDEIYPVISLYNLV
RNYVTQKPYSTKKIKLNFGIPTLADGWSKSKEYSNNAIILMRDNLYYLGIFNAKNKPDKKIIEGNTSENKGDYKKMIYNLLPGP
NKMIPKVFLSSKTGVETYKPSAYILEGYKQNKHIKSSKDFDITFCHDLIDYFKNCIAIHPEWKNFGFDFSDTSTYEDISGFYRE
VELQGYKIDWTYISEKDIDLLQEKGQLYLFQIYNKDFSKKSTGNDNLHTMYLKNLFSEENLKDIVLKLNGEAEIFFRKSSIKNP
IIHKKGSILVNRTYEAEEKDQFGNIQIVRKNIPENIYQELYKYFNDKSDKELSDEAAKLKNVVGHHEAATNIVKDYRYTYDKYF
LHMPITINFKANKTGFINDRILQYIAKEKDLHVIGIDRGERNLIYVSVIDTCGNIVEQKSFNIVNGYDYQIKLKQQEGARQIAR
KEWKEIGKIKEIKEGYLSLVIHEISKMVIKYNAIIAMEDLSYGFKKGRFKVERQVYQKFETMLINKLNYLVFKDISITENGGLL
KGYQLTYIPDKLKNVGHQCGCIFYVPAAYTSKIDPTTGFVNIFKFKDLTVDAKREFIKKFDSIRYDSEKNLFCFTFDYNNFITQ
NTVMSKSSWSVYTYGVRIKRRFVNGRFSNESDTIDITKDMEKTLEMTDINWRDGHDLRQDIIDYEIVQHIFEIFRLTVQMRNSL
SELEDRDYDRLISPVLNENNIFYDSAKAGDALPKDADANGAYCIALKGLYEIKQITENWKEDGKFSRDKLKISNKDWFDFIQNK
RYL
ErCas12a-Y307K-NT (SEQ ID NO: 45)
atgAATAACGGTACCAATAACTTTCAAAATTTTATCGGGATCTCCTCGTTGCAAAAAACTCTTCGTAATGCTTTAATCCCGACT
GAGACAACACAGCAGTTCATCGTTAAAAACGGCATCATTAAAGAAGATGAGCTGCGCGGCGAGAACCGTCAGATTTTAAAGGAC
ATCATGGACGACTATTACCGTGGGTTCATCTCAGAAACATTAAGCAGCATCGATGATATCGACTGGACCTCACTGTTTGAGAAG
ATGGAGATTCAACTTAAGAATGGAGACAACAAAGACACTTTAATTAAGGAGCAGACGGAATATCGTAAAGCTATCCATAAAAAA
TTTGCAAACGATGACCGTTTCAAAAATATGTTTTCCGCAAAATTGATTAGCGACATTTTACCTGAATTCGTAATCCATAACAAC
AACTATTCCGCATCTGAAAAAGAGGAGAAGACCCAAGTTATCAAACTTTTTTCACGTTTCGCGACATCTTTTAAAGACTACTTT
AAGAATCGTGCGAATTGTTTCAGTGCAGATGATATTTCGTCTAGTTCATGTCACCGTATCGTGAATGACAACGCTGAGATTTTC
TTTTCTAATGCGTTGGTGTATCGCCGCATCGTAAAGTCCTTGTCGAATGATGATATCAACAAAATTAGTGGTGACATGAAAGAC
TCCCTGAAAGAAATGTCATTAGAGGAGATTTACAGCTACGAAAAATACGGAGAGTTCATCACTCAGGAAGGTATCTCCTTTTAC
AACGATATTTGCGGCAAAGTTAATAGTTTCATGAATCTGTATTGTCAGAAGAATAAGGAAAACAAGAATCTGTACAAGTTACAA
AAGCTTCATAAACAGATCTTGTGCATCGCCGACACGTCTTATGAAGTCCCGTATAAATTTGAAAGCGACGAAGAAGTAAAACAG
AGTGTGAATGGATTCTTGGACAATATCTCATCAAAACACATTGTTGAACGTTTGCGCAAAATCGGCGACAACTATAACGGATAC
AACTTGGATAAAATTTATATCGTATCAAAATTTTATGAATCAGTATCCCAAAAGACTTACCGTGATTGGGAGACTATTAATACG
GCGTTAGAAATCCATTACAACAACATTCTGCCGGGTAACGGTAAATCGAAAGCGGACAAAGTGAAGAAGGCGGTTAAGAACGAT
CTTCAGAAGTCTATCACGGAGATTAATGAGCTGGTTTCCAATTACAAGTTGTGCTCGGATGATAACATCAAAGCTGAAACCTAT
ATCCATGAAATTTCTCATATTCTTAATAACTTCGAGGCACAAGAATTAAAATATAACCCAGAAATTCATCTGGTTGAGAGCGAA
CTTAAAGCTTCAGAATTAAAAAATGTTTTGGACGTAATTATGAACGCCTTCCATTGGTGCAGCGTGTTTATGACAGAGGAGTTA
GTAGATAAGGATAACAACTTTTATGCAGAATTGGAAGAGATCTATGATGAGATCTATCCAGTGATTTCACTGTATAACTTAGTC
CGTAATTACGTCACTCAGAAGCCGTACTCAACTAAAAAGATCAAGTTAAATTTTGGAATTCCGACATTGGCGGATGGTTGGAGT
AAGTCTAAGGAATACTCAAATAACGCTATTATCTTAATGCGTGACAACCTGTATTACTTGGGTATTTTCAATGCCAAAAATAAG
CCCGATAAAAAAATCATTGAAGGGAATACTTCAGAAAATAAGGGAGATTACAAAAAAATGATTTATAACCTTTTGCCAGGCCCA
AACAAAATGATCCCCAAGGTGTTTTTGAGTAGTAAGACGGGAGTAGAAACATATAAGCCATCAGCGTACATTCTTGAAGGGTAC
AAACAAAATAAACACATCAAGAGCAGCAAGGACTTTGACATTACATTTTGTCATGACTTAATCGACTACTTTAAAAATTGCATT
GCCATTCACCCTGAGTGGAAAAATTTTGGTTTCGACTTCAGTGATACCTCTACCTATGAAGATATCTCTGGTTTTTATCGTGAG
GTAGAACTTCAGGGTTACAAGATCGATTGGACGTACATTTCCGAGAAAGACATTGATCTTTTACAAGAGAAGGGTCAGCTTTAC
TTATTTCAGATCTACAATAAAGACTTTTCGAAAAAATCCACGGGCAACGACAACCTTCATACAATGTACTTAAAGAACCTGTTC
TCTGAAGAAAACTTGAAAGATATCGTGCTTAAATTGAATGGCGAGGCCGAGATTTTTTTCCGTAAAAGCTCGATTAAGAATCCC
ATCATCCACAAGAAAGGCAGCATTCTGGTAAATCGTACCTATGAAGCGGAGGAAAAGGACCAATTTGGTAATATTCAGATTGTC
CGTAAGAACATCCCTGAAAATATCTATCAAGAATTATATAAATATTTCAACGATAAGTCGGACAAGGAACTTAGCGATGAAGCC
GCGAAGTTGAAAAATGTTGTTGGTCACCACGAAGCAGCAACAAACATTGTGAAAGACTATCGCTACACTTACGATAAGTACTTT
TTACATATGCCTATTACGATTAACTTTAAGGCAAATAAGACAGGTTTTATCAACGACCGTATCCTGCAATATATTGCAAAAGAG
AAGGACCTGCATGTCATTGGGATTGATCGCGGTGAACGCAATCTGATTTACGTGAGTGTTATTGATACCTGCGGTAATATTGTT
GAGCAAAAGTCTTTTAATATCGTTAATGGTTACGACTACCAAATTAAGCTTAAACAACAGGAAGGTGCCCGCCAGATCGCCCGT
AAGGAGTGGAAGGAAATCGGAAAAATTAAGGAAATCAAAGAGGGATATCTGAGCTTGGTTATTCATGAAATCTCAAAGATGGTT
ATTAAGTACAACGCCATCATCGCTATGGAAGACTTATCGTATGGGTTTAAAAAGGGTCGTTTCAAAGTTGAGCGCCAGGTCTAC
CAAAAGTTTGAAACGATGCTTATTAATAAATTAAACTACTTGGTTTTCAAAGATATCTCTATTACCGAGAATGGAGGTTTACTG
AAAGGATACCAGTTAACGTATATCCCCGATAAGCTTAAAAACGTGGGCCATCAGTGTGGCTGTATTTTCTATGTGCCCGCGGCA
TATACATCAAAAATTGACCCGACGACGGGTTTCGTTAATATCTTCAAGTTCAAAGATCTGACAGTTGATGCAAAACGCGAATTC
ATTAAGAAGTTCGATAGTATTCGCTATGACTCCGAGAAAAATTTGTTTTGCTTCACTTTTGACTACAATAACTTTATTACTCAG
AATACAGTCATGAGTAAAAGCTCCTGGTCGGTTTACACGTACGGGGTACGCATCAAACGTCGTTTTGTGAATGGTCGTTTTAGT
AATGAGTCGGATACAATTGATATTACCAAGGATATGGAGAAGACTCTGGAAATGACAGACATCAATTGGCGTGATGGACATGAT
TTGCGTCAGGACATTATCGACTATGAGATTGTGCAGCATATTTTCGAAATTTTTCGCCTGACGGTGCAAATGCGTAATTCCTTA
AGCGAACTGGAAGATCGCGACTATGACCGCTTAATTTCTCCTGTGCTGAATGAGAACAACATCTTCTATGACTCAGCGAAAGCC
GGGGACGCTTTGCCAAAGGATGCAGATGCTAACGGTGCATATTGTATTGCTCTGAAAGGCCTTTACGAGATCAAACAAATTACT
GAAAACTGGAAGGAAGATGGAAAGTTTTCCCGTGATAAATTGAAGATCTCTAATAAGGACTGGTTTGACTTTATCCAAAATAAA
CGTTATTTA
ErCas12a-Y307K-AA (SEQ ID NO: 46)
MNNGTNNFQNFIGISSLQKTLRNALIPTETTQQFIVKNGIIKEDELRGENRQILKDIMDDYYRGFISETLSSIDDIDWTSLFEK
MEIQLKNGDNKDTLIKEQTEYRKAIHKKFANDDRFKNMFSAKLISDILPEFVIHNNNYSASEKEEKTQVIKLFSRFATSFKDYF
KNRANCFSADDISSSSCHRIVNDNAEIFFSNALVYRRIVKSLSNDDINKISGDMKDSLKEMSLEEIYSYEKYGEFITQEGISFY
NDICGKVNSFMNLYCQKNKENKNLYKLQKLHKQILCIADTSYEVPYKFESDEEVKQSVNGELDNISSKHIVERLRKIGDNYNGY
NLDKIYIVSKFYESVSQKTYRDWETINTALEIHYNNILPGNGKSKADKVKKAVKNDLQKSITEINELVSNYKLCSDDNIKAETY
IHEISHILNNFEAQELKYNPEIHLVESELKASELKNVLDVIMNAFHWCSVFMTEELVDKDNNFYAELEEIYDEIYPVISLYNLV
RNYVTQKPYSTKKIKLNFGIPTLADGWSKSKEYSNNAIILMRDNLYYLGIFNAKNKPDKKIIEGNTSENKGDYKKMIYNLLPGP
NKMIPKVFLSSKTGVETYKPSAYILEGYKQNKHIKSSKDFDITFCHDLIDYFKNCIAIHPEWKNFGFDFSDTSTYEDISGFYRE
VELQGYKIDWTYISEKDIDLLQEKGQLYLFQIYNKDFSKKSTGNDNLHTMYLKNLFSEENLKDIVLKLNGEAEIFFRKSSIKNP
IIHKKGSILVNRTYEAEEKDQFGNIQIVRKNIPENIYQELYKYFNDKSDKELSDEAAKLKNVVGHHEAATNIVKDYRYTYDKYF
LHMPITINFKANKTGFINDRILQYIAKEKDLHVIGIDRGERNLIYVSVIDTCGNIVEQKSFNIVNGYDYQIKLKQQEGARQIAR
KEWKEIGKIKEIKEGYLSLVIHEISKMVIKYNAIIAMEDLSYGFKKGRFKVERQVYQKFETMLINKLNYLVFKDISITENGGLL
KGYQLTYIPDKLKNVGHQCGCIFYVPAAYTSKIDPTTGFVNIFKFKDLTVDAKREFIKKFDSIRYDSEKNLFCFTEDYNNFITQ
NTVMSKSSWSVYTYGVRIKRRFVNGRFSNESDTIDITKDMEKTLEMTDINWRDGHDLRQDIIDYEIVQHIFEIFRLTVQMRNSL
SELEDRDYDRLISPVLNENNIFYDSAKAGDALPKDADANGAYCIALKGLYEIKQITENWKEDGKFSRDKLKISNKDWFDFIQNK
RYL
ErCas12a-Q353R-NT (SEQ ID NO: 47)
atgAATAACGGTACCAATAACTTTCAAAATTTTATCGGGATCTCCTCGTTGCAAAAAACTCTTCGTAATGCTTTAATCCCGACT
GAGACAACACAGCAGTTCATCGTTAAAAACGGCATCATTAAAGAAGATGAGCTGCGCGGCGAGAACCGTCAGATTTTAAAGGAC
ATCATGGACGACTATTACCGTGGGTTCATCTCAGAAACATTAAGCAGCATCGATGATATCGACTGGACCTCACTGTTTGAGAAG
ATGGAGATTCAACTTAAGAATGGAGACAACAAAGACACTTTAATTAAGGAGCAGACGGAATATCGTAAAGCTATCCATAAAAAA
TTTGCAAACGATGACCGTTTCAAAAATATGTTTTCCGCAAAATTGATTAGCGACATTTTACCTGAATTCGTAATCCATAACAAC
AACTATTCCGCATCTGAAAAAGAGGAGAAGACCCAAGTTATCAAACTTTTTTCACGTTTCGCGACATCTTTTAAAGACTACTTT
AAGAATCGTGCGAATTGTTTCAGTGCAGATGATATTTCGTCTAGTTCATGTCACCGTATCGTGAATGACAACGCTGAGATTTTC
TTTTCTAATGCGTTGGTGTATCGCCGCATCGTAAAGTCCTTGTCGAATGATGATATCAACAAAATTAGTGGTGACATGAAAGAC
TCCCTGAAAGAAATGTCATTAGAGGAGATTTACAGCTACGAAAAATACGGAGAGTTCATCACTCAGGAAGGTATCTCCTTTTAC
AACGATATTTGCGGCAAAGTTAATAGTTTCATGAATCTGTATTGTCAGAAGAATAAGGAAAACAAGAATCTGTACAAGTTACAA
AAGCTTCATAAACAGATCTTGTGCATCGCCGACACGTCTTATGAAGTCCCGTATAAATTTGAAAGCGACGAAGAAGTATATCAG
AGTGTGAATGGATTCTTGGACAATATCTCATCAAAACACATTGTTGAACGTTTGCGCAAAATCGGCGACAACTATAACGGATAC
AACTTGGATAAAATTTATATCGTATCAAAATTTTATGAATCAGTATCCCGTAAGACTTACCGTGATTGGGAGACTATTAATACG
GCGTTAGAAATCCATTACAACAACATTCTGCCGGGTAACGGTAAATCGAAAGCGGACAAAGTGAAGAAGGCGGTTAAGAACGAT
CTTCAGAAGTCTATCACGGAGATTAATGAGCTGGTTTCCAATTACAAGTTGTGCTCGGATGATAACATCAAAGCTGAAACCTAT
ATCCATGAAATTTCTCATATTCTTAATAACTTCGAGGCACAAGAATTAAAATATAACCCAGAAATTCATCTGGTTGAGAGCGAA
CTTAAAGCTTCAGAATTAAAAAATGTTTTGGACGTAATTATGAACGCCTTCCATTGGTGCAGCGTGTTTATGACAGAGGAGTTA
GTAGATAAGGATAACAACTTTTATGCAGAATTGGAAGAGATCTATGATGAGATCTATCCAGTGATTTCACTGTATAACTTAGTC
CGTAATTACGTCACTCAGAAGCCGTACTCAACTAAAAAGATCAAGTTAAATTTTGGAATTCCGACATTGGCGGATGGTTGGAGT
AAGTCTAAGGAATACTCAAATAACGCTATTATCTTAATGCGTGACAACCTGTATTACTTGGGTATTTTCAATGCCAAAAATAAG
CCCGATAAAAAAATCATTGAAGGGAATACTTCAGAAAATAAGGGAGATTACAAAAAAATGATTTATAACCTTTTGCCAGGCCCA
AACAAAATGATCCCCAAGGTGTTTTTGAGTAGTAAGACGGGAGTAGAAACATATAAGCCATCAGCGTACATTCTTGAAGGGTAC
AAACAAAATAAACACATCAAGAGCAGCAAGGACTTTGACATTACATTTTGTCATGACTTAATCGACTACTTTAAAAATTGCATT
GCCATTCACCCTGAGTGGAAAAATTTTGGTTTCGACTTCAGTGATACCTCTACCTATGAAGATATCTCTGGTTTTTATCGTGAG
GTAGAACTTCAGGGTTACAAGATCGATTGGACGTACATTTCCGAGAAAGACATTGATCTTTTACAAGAGAAGGGTCAGCTTTAC
TTATTTCAGATCTACAATAAAGACTTTTCGAAAAAATCCACGGGCAACGACAACCTTCATACAATGTACTTAAAGAACCTGTTC
TCTGAAGAAAACTTGAAAGATATCGTGCTTAAATTGAATGGCGAGGCCGAGATTTTTTTCCGTAAAAGCTCGATTAAGAATCCC
ATCATCCACAAGAAAGGCAGCATTCTGGTAAATCGTACCTATGAAGCGGAGGAAAAGGACCAATTTGGTAATATTCAGATTGTC
CGTAAGAACATCCCTGAAAATATCTATCAAGAATTATATAAATATTTCAACGATAAGTCGGACAAGGAACTTAGCGATGAAGCC
GCGAAGTTGAAAAATGTTGTTGGTCACCACGAAGCAGCAACAAACATTGTGAAAGACTATCGCTACACTTACGATAAGTACTTT
TTACATATGCCTATTACGATTAACTTTAAGGCAAATAAGACAGGTTTTATCAACGACCGTATCCTGCAATATATTGCAAAAGAG
AAGGACCTGCATGTCATTGGGATTGATCGCGGTGAACGCAATCTGATTTACGTGAGTGTTATTGATACCTGCGGTAATATTGTT
GAGCAAAAGTCTTTTAATATCGTTAATGGTTACGACTACCAAATTAAGCTTAAACAACAGGAAGGTGCCCGCCAGATCGCCCGT
AAGGAGTGGAAGGAAATCGGAAAAATTAAGGAAATCAAAGAGGGATATCTGAGCTTGGTTATTCATGAAATCTCAAAGATGGTT
ATTAAGTACAACGCCATCATCGCTATGGAAGACTTATCGTATGGGTTTAAAAAGGGTCGTTTCAAAGTTGAGCGCCAGGTCTAC
CAAAAGTTTGAAACGATGCTTATTAATAAATTAAACTACTTGGTTTTCAAAGATATCTCTATTACCGAGAATGGAGGTTTACTG
AAAGGATACCAGTTAACGTATATCCCCGATAAGCTTAAAAACGTGGGCCATCAGTGTGGCTGTATTTTCTATGTGCCCGCGGCA
TATACATCAAAAATTGACCCGACGACGGGTTTCGTTAATATCTTCAAGTTCAAAGATCTGACAGTTGATGCAAAACGCGAATTC
ATTAAGAAGTTCGATAGTATTCGCTATGACTCCGAGAAAAATTTGTTTTGCTTCACTTTTGACTACAATAACTTTATTACTCAG
AATACAGTCATGAGTAAAAGCTCCTGGTCGGTTTACACGTACGGGGTACGCATCAAACGTCGTTTTGTGAATGGTCGTTTTAGT
AATGAGTCGGATACAATTGATATTACCAAGGATATGGAGAAGACTCTGGAAATGACAGACATCAATTGGCGTGATGGACATGAT
TTGCGTCAGGACATTATCGACTATGAGATTGTGCAGCATATTTTCGAAATTTTTCGCCTGACGGTGCAAATGCGTAATTCCTTA
AGCGAACTGGAAGATCGCGACTATGACCGCTTAATTTCTCCTGTGCTGAATGAGAACAACATCTTCTATGACTCAGCGAAAGCC
GGGGACGCTTTGCCAAAGGATGCAGATGCTAACGGTGCATATTGTATTGCTCTGAAAGGCCTTTACGAGATCAAACAAATTACT
GAAAACTGGAAGGAAGATGGAAAGTTTTCCCGTGATAAATTGAAGATCTCTAATAAGGACTGGTTTGACTTTATCCAAAATAAA
CGTTATTTA
ErCas12a-Q353R-AA (SEQ ID NO: 48)
MNNGTNNFQNFIGISSLQKTLRNALIPTETTQQFIVKNGIIKEDELRGENRQILKDIMDDYYRGFISETLSSIDDIDWTSLFEK
MEIQLKNGDNKDTLIKEQTEYRKAIHKKFANDDRFKNMESAKLISDILPEFVIHNNNYSASEKEEKTQVIKLESRFATSFKDYF
KNRANCFSADDISSSSCHRIVNDNAEIFFSNALVYRRIVKSLSNDDINKISGDMKDSLKEMSLEEIYSYEKYGEFITQEGISFY
NDICGKVNSFMNLYCQKNKENKNLYKLQKLHKQILCIADTSYEVPYKFESDEEVYQSVNGELDNISSKHIVERLRKIGDNYNGY
NLDKIYIVSKFYESVSRKTYRDWETINTALEIHYNNILPGNGKSKADKVKKAVKNDLQKSITEINELVSNYKLCSDDNIKAETY
IHEISHILNNFEAQELKYNPEIHLVESELKASELKNVLDVIMNAFHWCSVFMTEELVDKDNNFYAELEEIYDEIYPVISLYNLV
RNYVTQKPYSTKKIKLNFGIPTLADGWSKSKEYSNNAIILMRDNLYYLGIFNAKNKPDKKIIEGNTSENKGDYKKMIYNLLPGP
NKMIPKVFLSSKTGVETYKPSAYILEGYKQNKHIKSSKDFDITFCHDLIDYFKNCIAIHPEWKNFGFDFSDTSTYEDISGFYRE
VELQGYKIDWTYISEKDIDLLQEKGQLYLFQIYNKDFSKKSTGNDNLHTMYLKNLFSEENLKDIVLKLNGEAEIFFRKSSIKNP
IIHKKGSILVNRTYEAEEKDQFGNIQIVRKNIPENIYQELYKYFNDKSDKELSDEAAKLKNVVGHHEAATNIVKDYRYTYDKYF
LHMPITINFKANKTGFINDRILQYIAKEKDLHVIGIDRGERNLIYVSVIDTCGNIVEQKSFNIVNGYDYQIKLKQQEGARQIAR
KEWKEIGKIKEIKEGYLSLVIHEISKMVIKYNAIIAMEDLSYGFKKGRFKVERQVYQKFETMLINKLNYLVFKDISITENGGLL
KGYQLTYIPDKLKNVGHQCGCIFYVPAAYTSKIDPTTGFVNIFKFKDLTVDAKREFIKKFDSIRYDSEKNLFCFTFDYNNFITQ
NTVMSKSSWSVYTYGVRIKRRFVNGRFSNESDTIDITKDMEKTLEMTDINWRDGHDLRQDIIDYEIVQHIFEIFRLTVQMRNSL
SELEDRDYDRLISPVLNENNIFYDSAKAGDALPKDADANGAYCIALKGLYEIKQITENWKEDGKFSRDKLKISNKDWEDFIQNK
RYL
ErCas12a-L444W-NT (SEQ ID NO: 49)
atgAATAACGGTACCAATAACTTTCAAAATTTTATCGGGATCTCCTCGTTGCAAAAAACTCTTCGTAATGCTTTAATCCCGACT
GAGACAACACAGCAGTTCATCGTTAAAAACGGCATCATTAAAGAAGATGAGCTGCGCGGCGAGAACCGTCAGATTTTAAAGGAC
ATCATGGACGACTATTACCGTGGGTTCATCTCAGAAACATTAAGCAGCATCGATGATATCGACTGGACCTCACTGTTTGAGAAG
ATGGAGATTCAACTTAAGAATGGAGACAACAAAGACACTTTAATTAAGGAGCAGACGGAATATCGTAAAGCTATCCATAAAAAA
TTTGCAAACGATGACCGTTTCAAAAATATGTTTTCCGCAAAATTGATTAGCGACATTTTACCTGAATTCGTAATCCATAACAAC
AACTATTCCGCATCTGAAAAAGAGGAGAAGACCCAAGTTATCAAACTTTTTTCACGTTTCGCGACATCTTTTAAAGACTACTTT
AAGAATCGTGCGAATTGTTTCAGTGCAGATGATATTTCGTCTAGTTCATGTCACCGTATCGTGAATGACAACGCTGAGATTTTC
TTTTCTAATGCGTTGGTGTATCGCCGCATCGTAAAGTCCTTGTCGAATGATGATATCAACAAAATTAGTGGTGACATGAAAGAC
TCCCTGAAAGAAATGTCATTAGAGGAGATTTACAGCTACGAAAAATACGGAGAGTTCATCACTCAGGAAGGTATCTCCTTTTAC
AACGATATTTGCGGCAAAGTTAATAGTTTCATGAATCTGTATTGTCAGAAGAATAAGGAAAACAAGAATCTGTACAAGTTACAA
AAGCTTCATAAACAGATCTTGTGCATCGCCGACACGTCTTATGAAGTCCCGTATAAATTTGAAAGCGACGAAGAAGTATATCAG
AGTGTGAATGGATTCTTGGACAATATCTCATCAAAACACATTGTTGAACGTTTGCGCAAAATCGGCGACAACTATAACGGATAC
AACTTGGATAAAATTTATATCGTATCAAAATTTTATGAATCAGTATCCCAAAAGACTTACCGTGATTGGGAGACTATTAATACG
GCGTTAGAAATCCATTACAACAACATTCTGCCGGGTAACGGTAAATCGAAAGCGGACAAAGTGAAGAAGGCGGTTAAGAACGAT
CTTCAGAAGTCTATCACGGAGATTAATGAGCTGGTTTCCAATTACAAGTTGTGCTCGGATGATAACATCAAAGCTGAAACCTAT
ATCCATGAAATTTCTCATATTCTTAATAACTTCGAGGCACAAGAATTAAAATATAACCCAGAAATTCATTGGGTTGAGAGCGAA
CTTAAAGCTTCAGAATTAAAAAATGTTTTGGACGTAATTATGAACGCCTTCCATTGGTGCAGCGTGTTTATGACAGAGGAGTTA
GTAGATAAGGATAACAACTTTTATGCAGAATTGGAAGAGATCTATGATGAGATCTATCCAGTGATTTCACTGTATAACTTAGTC
CGTAATTACGTCACTCAGAAGCCGTACTCAACTAAAAAGATCAAGTTAAATTTTGGAATTCCGACATTGGCGGATGGTTGGAGT
AAGTCTAAGGAATACTCAAATAACGCTATTATCTTAATGCGTGACAACCTGTATTACTTGGGTATTTTCAATGCCAAAAATAAG
CCCGATAAAAAAATCATTGAAGGGAATACTTCAGAAAATAAGGGAGATTACAAAAAAATGATTTATAACCTTTTGCCAGGCCCA
AACAAAATGATCCCCAAGGTGTTTTTGAGTAGTAAGACGGGAGTAGAAACATATAAGCCATCAGCGTACATTCTTGAAGGGTAC
AAACAAAATAAACACATCAAGAGCAGCAAGGACTTTGACATTACATTTTGTCATGACTTAATCGACTACTTTAAAAATTGCATT
GCCATTCACCCTGAGTGGAAAAATTTTGGTTTCGACTTCAGTGATACCTCTACCTATGAAGATATCTCTGGTTTTTATCGTGAG
GTAGAACTTCAGGGTTACAAGATCGATTGGACGTACATTTCCGAGAAAGACATTGATCTTTTACAAGAGAAGGGTCAGCTTTAC
TTATTTCAGATCTACAATAAAGACTTTTCGAAAAAATCCACGGGCAACGACAACCTTCATACAATGTACTTAAAGAACCTGTTC
TCTGAAGAAAACTTGAAAGATATCGTGCTTAAATTGAATGGCGAGGCCGAGATTTTTTTCCGTAAAAGCTCGATTAAGAATCCC
ATCATCCACAAGAAAGGCAGCATTCTGGTAAATCGTACCTATGAAGCGGAGGAAAAGGACCAATTTGGTAATATTCAGATTGTC
CGTAAGAACATCCCTGAAAATATCTATCAAGAATTATATAAATATTTCAACGATAAGTCGGACAAGGAACTTAGCGATGAAGCC
GCGAAGTTGAAAAATGTTGTTGGTCACCACGAAGCAGCAACAAACATTGTGAAAGACTATCGCTACACTTACGATAAGTACTTT
TTACATATGCCTATTACGATTAACTTTAAGGCAAATAAGACAGGTTTTATCAACGACCGTATCCTGCAATATATTGCAAAAGAG
AAGGACCTGCATGTCATTGGGATTGATCGCGGTGAACGCAATCTGATTTACGTGAGTGTTATTGATACCTGCGGTAATATTGTT
GAGCAAAAGTCTTTTAATATCGTTAATGGTTACGACTACCAAATTAAGCTTAAACAACAGGAAGGTGCCCGCCAGATCGCCCGT
AAGGAGTGGAAGGAAATCGGAAAAATTAAGGAAATCAAAGAGGGATATCTGAGCTTGGTTATTCATGAAATCTCAAAGATGGTT
ATTAAGTACAACGCCATCATCGCTATGGAAGACTTATCGTATGGGTTTAAAAAGGGTCGTTTCAAAGTTGAGCGCCAGGTCTAC
CAAAAGTTTGAAACGATGCTTATTAATAAATTAAACTACTTGGTTTTCAAAGATATCTCTATTACCGAGAATGGAGGTTTACTG
AAAGGATACCAGTTAACGTATATCCCCGATAAGCTTAAAAACGTGGGCCATCAGTGTGGCTGTATTTTCTATGTGCCCGCGGCA
TATACATCAAAAATTGACCCGACGACGGGTTTCGTTAATATCTTCAAGTTCAAAGATCTGACAGTTGATGCAAAACGCGAATTC
ATTAAGAAGTTCGATAGTATTCGCTATGACTCCGAGAAAAATTTGTTTTGCTTCACTTTTGACTACAATAACTTTATTACTCAG
AATACAGTCATGAGTAAAAGCTCCTGGTCGGTTTACACGTACGGGGTACGCATCAAACGTCGTTTTGTGAATGGTCGTTTTAGT
AATGAGTCGGATACAATTGATATTACCAAGGATATGGAGAAGACTCTGGAAATGACAGACATCAATTGGCGTGATGGACATGAT
TTGCGTCAGGACATTATCGACTATGAGATTGTGCAGCATATTTTCGAAATTTTTCGCCTGACGGTGCAAATGCGTAATTCCTTA
AGCGAACTGGAAGATCGCGACTATGACCGCTTAATTTCTCCTGTGCTGAATGAGAACAACATCTTCTATGACTCAGCGAAAGCC
GGGGACGCTTTGCCAAAGGATGCAGATGCTAACGGTGCATATTGTATTGCTCTGAAAGGCCTTTACGAGATCAAACAAATTACT
GAAAACTGGAAGGAAGATGGAAAGTTTTCCCGTGATAAATTGAAGATCTCTAATAAGGACTGGTTTGACTTTATCCAAAATAAA
CGTTATTTA
ErCas12a-L444W-AA (SEQ ID NO: 50)
MNNGTNNFQNFIGISSLQKTLRNALIPTETTQQFIVKNGIIKEDELRGENRQILKDIMDDYYRGFISETLSSIDDIDWTSLFEK
MEIQLKNGDNKDTLIKEQTEYRKAIHKKFANDDRFKNMFSAKLISDILPEFVIHNNNYSASEKEEKTQVIKLESRFATSFKDYF
KNRANCESADDISSSSCHRIVNDNAEIFFSNALVYRRIVKSLSNDDINKISGDMKDSLKEMSLEEIYSYEKYGEFITQEGISFY
NDICGKVNSFMNLYCQKNKENKNLYKLQKLHKQILCIADTSYEVPYKFESDEEVYQSVNGELDNISSKHIVERLRKIGDNYNGY
NLDKIYIVSKFYESVSQKTYRDWETINTALEIHYNNILPGNGKSKADKVKKAVKNDLQKSITEINELVSNYKLCSDDNIKAETY
IHEISHILNNFEAQELKYNPEIHWVESELKASELKNVLDVIMNAFHWCSVFMTEELVDKDNNFYAELEEIYDEIYPVISLYNLV
RNYVTQKPYSTKKIKLNFGIPTLADGWSKSKEYSNNAIILMRDNLYYLGIFNAKNKPDKKIIEGNTSENKGDYKKMIYNLLPGP
NKMIPKVFLSSKTGVETYKPSAYILEGYKQNKHIKSSKDFDITFCHDLIDYFKNCIAIHPEWKNFGFDFSDTSTYEDISGFYRE
VELQGYKIDWTYISEKDIDLLQEKGQLYLFQIYNKDFSKKSTGNDNLHTMYLKNLFSEENLKDIVLKLNGEAEIFFRKSSIKNP
IIHKKGSILVNRTYEAEEKDQFGNIQIVRKNIPENIYQELYKYFNDKSDKELSDEAAKLKNVVGHHEAATNIVKDYRYTYDKYF
LHMPITINFKANKTGFINDRILQYIAKEKDLHVIGIDRGERNLIYVSVIDTCGNIVEQKSFNIVNGYDYQIKLKQQEGARQIAR
KEWKEIGKIKEIKEGYLSLVIHEISKMVIKYNAIIAMEDLSYGFKKGRFKVERQVYQKFETMLINKLNYLVFKDISITENGGLL
KGYQLTYIPDKLKNVGHQCGCIFYVPAAYTSKIDPTTGFVNIFKFKDLTVDAKREFIKKFDSIRYDSEKNLFCFTFDYNNFITQ
NTVMSKSSWSVYTYGVRIKRRFVNGRFSNESDTIDITKDMEKTLEMTDINWRDGHDLRQDIIDYEIVQHIFEIFRLTVQMRNSL
SELEDRDYDRLISPVLNENNIFYDSAKAGDALPKDADANGAYCIALKGLYEIKQITENWKEDGKFSRDKLKISNKDWEDFIQNK
RYL
ErCas12a-F465R-NT (SEQ ID NO: 51)
atgAATAACGGTACCAATAACTTTCAAAATTTTATCGGGATCTCCTCGTTGCAAAAAACTCTTCGTAATGCTTTAATCCCGACT
GAGACAACACAGCAGTTCATCGTTAAAAACGGCATCATTAAAGAAGATGAGCTGCGCGGCGAGAACCGTCAGATTTTAAAGGAC
ATCATGGACGACTATTACCGTGGGTTCATCTCAGAAACATTAAGCAGCATCGATGATATCGACTGGACCTCACTGTTTGAGAAG
ATGGAGATTCAACTTAAGAATGGAGACAACAAAGACACTTTAATTAAGGAGCAGACGGAATATCGTAAAGCTATCCATAAAAAA
TTTGCAAACGATGACCGTTTCAAAAATATGTTTTCCGCAAAATTGATTAGCGACATTTTACCTGAATTCGTAATCCATAACAAC
AACTATTCCGCATCTGAAAAAGAGGAGAAGACCCAAGTTATCAAACTTTTTTCACGTTTCGCGACATCTTTTAAAGACTACTTT
AAGAATCGTGCGAATTGTTTCAGTGCAGATGATATTTCGTCTAGTTCATGTCACCGTATCGTGAATGACAACGCTGAGATTTTC
TTTTCTAATGCGTTGGTGTATCGCCGCATCGTAAAGTCCTTGTCGAATGATGATATCAACAAAATTAGTGGTGACATGAAAGAC
TCCCTGAAAGAAATGTCATTAGAGGAGATTTACAGCTACGAAAAATACGGAGAGTTCATCACTCAGGAAGGTATCTCCTTTTAC
AACGATATTTGCGGCAAAGTTAATAGTTTCATGAATCTGTATTGTCAGAAGAATAAGGAAAACAAGAATCTGTACAAGTTACAA
AAGCTTCATAAACAGATCTTGTGCATCGCCGACACGTCTTATGAAGTCCCGTATAAATTTGAAAGCGACGAAGAAGTATATCAG
AGTGTGAATGGATTCTTGGACAATATCTCATCAAAACACATTGTTGAACGTTTGCGCAAAATCGGCGACAACTATAACGGATAC
AACTTGGATAAAATTTATATCGTATCAAAATTTTATGAATCAGTATCCCAAAAGACTTACCGTGATTGGGAGACTATTAATACG
GCGTTAGAAATCCATTACAACAACATTCTGCCGGGTAACGGTAAATCGAAAGCGGACAAAGTGAAGAAGGCGGTTAAGAACGAT
CTTCAGAAGTCTATCACGGAGATTAATGAGCTGGTTTCCAATTACAAGTTGTGCTCGGATGATAACATCAAAGCTGAAACCTAT
ATCCATGAAATTTCTCATATTCTTAATAACTTCGAGGCACAAGAATTAAAATATAACCCAGAAATTCATCTGGTTGAGAGCGAA
CTTAAAGCTTCAGAATTAAAAAATGTTTTGGACGTAATTATGAACGCCCGTCATTGGTGCAGCGTGTTTATGACAGAGGAGTTA
GTAGATAAGGATAACAACTTTTATGCAGAATTGGAAGAGATCTATGATGAGATCTATCCAGTGATTTCACTGTATAACTTAGTC
CGTAATTACGTCACTCAGAAGCCGTACTCAACTAAAAAGATCAAGTTAAATTTTGGAATTCCGACATTGGCGGATGGTTGGAGT
AAGTCTAAGGAATACTCAAATAACGCTATTATCTTAATGCGTGACAACCTGTATTACTTGGGTATTTTCAATGCCAAAAATAAG
CCCGATAAAAAAATCATTGAAGGGAATACTTCAGAAAATAAGGGAGATTACAAAAAAATGATTTATAACCTTTTGCCAGGCCCA
AACAAAATGATCCCCAAGGTGTTTTTGAGTAGTAAGACGGGAGTAGAAACATATAAGCCATCAGCGTACATTCTTGAAGGGTAC
AAACAAAATAAACACATCAAGAGCAGCAAGGACTTTGACATTACATTTTGTCATGACTTAATCGACTACTTTAAAAATTGCATT
GCCATTCACCCTGAGTGGAAAAATTTTGGTTTCGACTTCAGTGATACCTCTACCTATGAAGATATCTCTGGTTTTTATCGTGAG
GTAGAACTTCAGGGTTACAAGATCGATTGGACGTACATTTCCGAGAAAGACATTGATCTTTTACAAGAGAAGGGTCAGCTTTAC
TTATTTCAGATCTACAATAAAGACTTTTCGAAAAAATCCACGGGCAACGACAACCTTCATACAATGTACTTAAAGAACCTGTTC
TCTGAAGAAAACTTGAAAGATATCGTGCTTAAATTGAATGGCGAGGCCGAGATTTTTTTCCGTAAAAGCTCGATTAAGAATCCC
ATCATCCACAAGAAAGGCAGCATTCTGGTAAATCGTACCTATGAAGCGGAGGAAAAGGACCAATTTGGTAATATTCAGATTGTC
CGTAAGAACATCCCTGAAAATATCTATCAAGAATTATATAAATATTTCAACGATAAGTCGGACAAGGAACTTAGCGATGAAGCC
GCGAAGTTGAAAAATGTTGTTGGTCACCACGAAGCAGCAACAAACATTGTGAAAGACTATCGCTACACTTACGATAAGTACTTT
TTACATATGCCTATTACGATTAACTTTAAGGCAAATAAGACAGGTTTTATCAACGACCGTATCCTGCAATATATTGCAAAAGAG
AAGGACCTGCATGTCATTGGGATTGATCGCGGTGAACGCAATCTGATTTACGTGAGTGTTATTGATACCTGCGGTAATATTGTT
GAGCAAAAGTCTTTTAATATCGTTAATGGTTACGACTACCAAATTAAGCTTAAACAACAGGAAGGTGCCCGCCAGATCGCCCGT
AAGGAGTGGAAGGAAATCGGAAAAATTAAGGAAATCAAAGAGGGATATCTGAGCTTGGTTATTCATGAAATCTCAAAGATGGTT
ATTAAGTACAACGCCATCATCGCTATGGAAGACTTATCGTATGGGTTTAAAAAGGGTCGTTTCAAAGTTGAGCGCCAGGTCTAC
CAAAAGTTTGAAACGATGCTTATTAATAAATTAAACTACTTGGTTTTCAAAGATATCTCTATTACCGAGAATGGAGGTTTACTG
AAAGGATACCAGTTAACGTATATCCCCGATAAGCTTAAAAACGTGGGCCATCAGTGTGGCTGTATTTTCTATGTGCCCGCGGCA
TATACATCAAAAATTGACCCGACGACGGGTTTCGTTAATATCTTCAAGTTCAAAGATCTGACAGTTGATGCAAAACGCGAATTC
ATTAAGAAGTTCGATAGTATTCGCTATGACTCCGAGAAAAATTTGTTTTGCTTCACTTTTGACTACAATAACTTTATTACTCAG
AATACAGTCATGAGTAAAAGCTCCTGGTCGGTTTACACGTACGGGGTACGCATCAAACGTCGTTTTGTGAATGGTCGTTTTAGT
AATGAGTCGGATACAATTGATATTACCAAGGATATGGAGAAGACTCTGGAAATGACAGACATCAATTGGCGTGATGGACATGAT
TTGCGTCAGGACATTATCGACTATGAGATTGTGCAGCATATTTTCGAAATTTTTCGCCTGACGGTGCAAATGCGTAATTCCTTA
AGCGAACTGGAAGATCGCGACTATGACCGCTTAATTTCTCCTGTGCTGAATGAGAACAACATCTTCTATGACTCAGCGAAAGCC
GGGGACGCTTTGCCAAAGGATGCAGATGCTAACGGTGCATATTGTATTGCTCTGAAAGGCCTTTACGAGATCAAACAAATTACT
GAAAACTGGAAGGAAGATGGAAAGTTTTCCCGTGATAAATTGAAGATCTCTAATAAGGACTGGTTTGACTTTATCCAAAATAAA
CGTTATTTA
ErCas12a-F465R-AA (SEQ ID NO: 52)
MNNGTNNFQNFIGISSLQKTLRNALIPTETTQQFIVKNGIIKEDELRGENRQILKDIMDDYYRGFISETLSSIDDIDWTSLFEK
MEIQLKNGDNKDTLIKEQTEYRKAIHKKFANDDRFKNMFSAKLISDILPEFVIHNNNYSASEKEEKTQVIKLFSRFATSFKDYF
KNRANCFSADDISSSSCHRIVNDNAEIFFSNALVYRRIVKSLSNDDINKISGDMKDSLKEMSLEEIYSYEKYGEFITQEGISFY
NDICGKVNSFMNLYCQKNKENKNLYKLQKLHKQILCIADTSYEVPYKFESDEEVYQSVNGELDNISSKHIVERLRKIGDNYNGY
NLDKIYIVSKFYESVSQKTYRDWETINTALEIHYNNILPGNGKSKADKVKKAVKNDLQKSITEINELVSNYKLCSDDNIKAETY
IHEISHILNNFEAQELKYNPEIHLVESELKASELKNVLDVIMNARHWCSVFMTEELVDKDNNFYAELEEIYDEIYPVISLYNLV
RNYVTQKPYSTKKIKLNFGIPTLADGWSKSKEYSNNAIILMRDNLYYLGIFNAKNKPDKKIIEGNTSENKGDYKKMIYNLLPGP
NKMIPKVFLSSKTGVETYKPSAYILEGYKQNKHIKSSKDFDITFCHDLIDYFKNCIAIHPEWKNFGFDFSDTSTYEDISGFYRE
VELQGYKIDWTYISEKDIDLLQEKGQLYLFQIYNKDFSKKSTGNDNLHTMYLKNLFSEENLKDIVLKLNGEAEIFFRKSSIKNP
IIHKKGSILVNRTYEAEEKDQFGNIQIVRKNIPENIYQELYKYFNDKSDKELSDEAAKLKNVVGHHEAATNIVKDYRYTYDKYF
LHMPITINFKANKTGFINDRILQYIAKEKDLHVIGIDRGERNLIYVSVIDTCGNIVEQKSFNIVNGYDYQIKLKQQEGARQIAR
KEWKEIGKIKEIKEGYLSLVIHEISKMVIKYNAIIAMEDLSYGFKKGRFKVERQVYQKFETMLINKLNYLVFKDISITENGGLL
KGYQLTYIPDKLKNVGHQCGCIFYVPAAYTSKIDPTTGFVNIFKFKDLTVDAKREFIKKFDSIRYDSEKNLFCFTFDYNNFITQ
NTVMSKSSWSVYTYGVRIKRRFVNGRFSNESDTIDITKDMEKTLEMTDINWRDGHDLRQDIIDYEIVQHIFEIFRLTVQMRNSL
SELEDRDYDRLISPVLNENNIFYDSAKAGDALPKDADANGAYCIALKGLYEIKQITENWKEDGKFSRDKLKISNKDWFDFIQNK
RYL
ErCas12a-S469K-NT (SEQ ID NO: 53)
atgAATAACGGTACCAATAACTTTCAAAATTTTATCGGGATCTCCTCGTTGCAAAAAACTCTTCGTAATGCTTTAATCCCGACT
GAGACAACACAGCAGTTCATCGTTAAAAACGGCATCATTAAAGAAGATGAGCTGCGCGGCGAGAACCGTCAGATTTTAAAGGAC
ATCATGGACGACTATTACCGTGGGTTCATCTCAGAAACATTAAGCAGCATCGATGATATCGACTGGACCTCACTGTTTGAGAAG
ATGGAGATTCAACTTAAGAATGGAGACAACAAAGACACTTTAATTAAGGAGCAGACGGAATATCGTAAAGCTATCCATAAAAAA
TTTGCAAACGATGACCGTTTCAAAAATATGTTTTCCGCAAAATTGATTAGCGACATTTTACCTGAATTCGTAATCCATAACAAC
AACTATTCCGCATCTGAAAAAGAGGAGAAGACCCAAGTTATCAAACTTTTTTCACGTTTCGCGACATCTTTTAAAGACTACTTT
AAGAATCGTGCGAATTGTTTCAGTGCAGATGATATTTCGTCTAGTTCATGTCACCGTATCGTGAATGACAACGCTGAGATTTTC
TTTTCTAATGCGTTGGTGTATCGCCGCATCGTAAAGTCCTTGTCGAATGATGATATCAACAAAATTAGTGGTGACATGAAAGAC
TCCCTGAAAGAAATGTCATTAGAGGAGATTTACAGCTACGAAAAATACGGAGAGTTCATCACTCAGGAAGGTATCTCCTTTTAC
AACGATATTTGCGGCAAAGTTAATAGTTTCATGAATCTGTATTGTCAGAAGAATAAGGAAAACAAGAATCTGTACAAGTTACAA
AAGCTTCATAAACAGATCTTGTGCATCGCCGACACGTCTTATGAAGTCCCGTATAAATTTGAAAGCGACGAAGAAGTATATCAG
AGTGTGAATGGATTCTTGGACAATATCTCATCAAAACACATTGTTGAACGTTTGCGCAAAATCGGCGACAACTATAACGGATAC
AACTTGGATAAAATTTATATCGTATCAAAATTTTATGAATCAGTATCCCAAAAGACTTACCGTGATTGGGAGACTATTAATACG
GCGTTAGAAATCCATTACAACAACATTCTGCCGGGTAACGGTAAATCGAAAGCGGACAAAGTGAAGAAGGCGGTTAAGAACGAT
CTTCAGAAGTCTATCACGGAGATTAATGAGCTGGTTTCCAATTACAAGTTGTGCTCGGATGATAACATCAAAGCTGAAACCTAT
ATCCATGAAATTTCTCATATTCTTAATAACTTCGAGGCACAAGAATTAAAATATAACCCAGAAATTCATCTGGTTGAGAGCGAA
CTTAAAGCTTCAGAATTAAAAAATGTTTTGGACGTAATTATGAACGCCTTCCATTGGTGCAAAGTGTTTATGACAGAGGAGTTA
GTAGATAAGGATAACAACTTTTATGCAGAATTGGAAGAGATCTATGATGAGATCTATCCAGTGATTTCACTGTATAACTTAGTC
CGTAATTACGTCACTCAGAAGCCGTACTCAACTAAAAAGATCAAGTTAAATTTTGGAATTCCGACATTGGCGGATGGTTGGAGT
AAGTCTAAGGAATACTCAAATAACGCTATTATCTTAATGCGTGACAACCTGTATTACTTGGGTATTTTCAATGCCAAAAATAAG
CCCGATAAAAAAATCATTGAAGGGAATACTTCAGAAAATAAGGGAGATTACAAAAAAATGATTTATAACCTTTTGCCAGGCCCA
AACAAAATGATCCCCAAGGTGTTTTTGAGTAGTAAGACGGGAGTAGAAACATATAAGCCATCAGCGTACATTCTTGAAGGGTAC
AAACAAAATAAACACATCAAGAGCAGCAAGGACTTTGACATTACATTTTGTCATGACTTAATCGACTACTTTAAAAATTGCATT
GCCATTCACCCTGAGTGGAAAAATTTTGGTTTCGACTTCAGTGATACCTCTACCTATGAAGATATCTCTGGTTTTTATCGTGAG
GTAGAACTTCAGGGTTACAAGATCGATTGGACGTACATTTCCGAGAAAGACATTGATCTTTTACAAGAGAAGGGTCAGCTTTAC
TTATTTCAGATCTACAATAAAGACTTTTCGAAAAAATCCACGGGCAACGACAACCTTCATACAATGTACTTAAAGAACCTGTTC
TCTGAAGAAAACTTGAAAGATATCGTGCTTAAATTGAATGGCGAGGCCGAGATTTTTTTCCGTAAAAGCTCGATTAAGAATCCC
ATCATCCACAAGAAAGGCAGCATTCTGGTAAATCGTACCTATGAAGCGGAGGAAAAGGACCAATTTGGTAATATTCAGATTGTC
CGTAAGAACATCCCTGAAAATATCTATCAAGAATTATATAAATATTTCAACGATAAGTCGGACAAGGAACTTAGCGATGAAGCC
GCGAAGTTGAAAAATGTTGTTGGTCACCACGAAGCAGCAACAAACATTGTGAAAGACTATCGCTACACTTACGATAAGTACTTT
TTACATATGCCTATTACGATTAACTTTAAGGCAAATAAGACAGGTTTTATCAACGACCGTATCCTGCAATATATTGCAAAAGAG
AAGGACCTGCATGTCATTGGGATTGATCGCGGTGAACGCAATCTGATTTACGTGAGTGTTATTGATACCTGCGGTAATATTGTT
GAGCAAAAGTCTTTTAATATCGTTAATGGTTACGACTACCAAATTAAGCTTAAACAACAGGAAGGTGCCCGCCAGATCGCCCGT
AAGGAGTGGAAGGAAATCGGAAAAATTAAGGAAATCAAAGAGGGATATCTGAGCTTGGTTATTCATGAAATCTCAAAGATGGTT
ATTAAGTACAACGCCATCATCGCTATGGAAGACTTATCGTATGGGTTTAAAAAGGGTCGTTTCAAAGTTGAGCGCCAGGTCTAC
CAAAAGTTTGAAACGATGCTTATTAATAAATTAAACTACTTGGTTTTCAAAGATATCTCTATTACCGAGAATGGAGGTTTACTG
AAAGGATACCAGTTAACGTATATCCCCGATAAGCTTAAAAACGTGGGCCATCAGTGTGGCTGTATTTTCTATGTGCCCGCGGCA
TATACATCAAAAATTGACCCGACGACGGGTTTCGTTAATATCTTCAAGTTCAAAGATCTGACAGTTGATGCAAAACGCGAATTC
ATTAAGAAGTTCGATAGTATTCGCTATGACTCCGAGAAAAATTTGTTTTGCTTCACTTTTGACTACAATAACTTTATTACTCAG
AATACAGTCATGAGTAAAAGCTCCTGGTCGGTTTACACGTACGGGGTACGCATCAAACGTCGTTTTGTGAATGGTCGTTTTAGT
AATGAGTCGGATACAATTGATATTACCAAGGATATGGAGAAGACTCTGGAAATGACAGACATCAATTGGCGTGATGGACATGAT
TTGCGTCAGGACATTATCGACTATGAGATTGTGCAGCATATTTTCGAAATTTTTCGCCTGACGGTGCAAATGCGTAATTCCTTA
AGCGAACTGGAAGATCGCGACTATGACCGCTTAATTTCTCCTGTGCTGAATGAGAACAACATCTTCTATGACTCAGCGAAAGCC
GGGGACGCTTTGCCAAAGGATGCAGATGCTAACGGTGCATATTGTATTGCTCTGAAAGGCCTTTACGAGATCAAACAAATTACT
GAAAACTGGAAGGAAGATGGAAAGTTTTCCCGTGATAAATTGAAGATCTCTAATAAGGACTGGTTTGACTTTATCCAAAATAAA
CGTTATTTA
ErCas12a-S469K-AA (SEQ ID NO: 54)
MNNGTNNFQNFIGISSLQKTLRNALIPTETTQQFIVKNGIIKEDELRGENRQILKDIMDDYYRGFISETLSSIDDIDWTSLFEK
MEIQLKNGDNKDTLIKEQTEYRKAIHKKFANDDRFKNMFSAKLISDILPEFVIHNNNYSASEKEEKTQVIKLFSRFATSFKDYF
KNRANCESADDISSSSCHRIVNDNAEIFFSNALVYRRIVKSLSNDDINKISGDMKDSLKEMSLEEIYSYEKYGEFITQEGISFY
NDICGKVNSFMNLYCQKNKENKNLYKLQKLHKQILCIADTSYEVPYKFESDEEVYQSVNGELDNISSKHIVERLRKIGDNYNGY
NLDKIYIVSKFYESVSQKTYRDWETINTALEIHYNNILPGNGKSKADKVKKAVKNDLQKSITEINELVSNYKLCSDDNIKAETY
IHEISHILNNFEAQELKYNPEIHLVESELKASELKNVLDVIMNAFHWCKVFMTEELVDKDNNFYAELEEIYDEIYPVISLYNLV
RNYVTQKPYSTKKIKLNFGIPTLADGWSKSKEYSNNAIILMRDNLYYLGIFNAKNKPDKKIIEGNTSENKGDYKKMIYNLLPGP
NKMIPKVFLSSKTGVETYKPSAYILEGYKQNKHIKSSKDFDITFCHDLIDYFKNCIAIHPEWKNFGFDFSDTSTYEDISGFYRE
VELQGYKIDWTYISEKDIDLLQEKGQLYLFQIYNKDFSKKSTGNDNLHTMYLKNLFSEENLKDIVLKLNGEAEIFFRKSSIKNP
IIHKKGSILVNRTYEAEEKDQFGNIQIVRKNIPENIYQELYKYFNDKSDKELSDEAAKLKNVVGHHEAATNIVKDYRYTYDKYF
LHMPITINFKANKTGFINDRILQYIAKEKDLHVIGIDRGERNLIYVSVIDTCGNIVEQKSFNIVNGYDYQIKLKQQEGARQIAR
KEWKEIGKIKEIKEGYLSLVIHEISKMVIKYNAIIAMEDLSYGFKKGRFKVERQVYQKFETMLINKLNYLVFKDISITENGGLL
KGYQLTYIPDKLKNVGHQCGCIFYVPAAYTSKIDPTTGFVNIFKFKDLTVDAKREFIKKFDSIRYDSEKNLFCFTEDYNNFITQ
NTVMSKSSWSVYTYGVRIKRRFVNGRFSNESDTIDITKDMEKTLEMTDINWRDGHDLRQDIIDYEIVQHIFEIFRLTVQMRNSL
SELEDRDYDRLISPVLNENNIFYDSAKAGDALPKDADANGAYCIALKGLYEIKQITENWKEDGKFSRDKLKISNKDWFDFIQNK
RYL
ErCas12a-V470K-NT (SEQ ID NO: 55)
atgAATAACGGTACCAATAACTTTCAAAATTTTATCGGGATCTCCTCGTTGCAAAAAACTCTTCGTAATGCTTTAATCCCGACT
GAGACAACACAGCAGTTCATCGTTAAAAACGGCATCATTAAAGAAGATGAGCTGCGCGGCGAGAACCGTCAGATTTTAAAGGAC
ATCATGGACGACTATTACCGTGGGTTCATCTCAGAAACATTAAGCAGCATCGATGATATCGACTGGACCTCACTGTTTGAGAAG
ATGGAGATTCAACTTAAGAATGGAGACAACAAAGACACTTTAATTAAGGAGCAGACGGAATATCGTAAAGCTATCCATAAAAAA
TTTGCAAACGATGACCGTTTCAAAAATATGTTTTCCGCAAAATTGATTAGCGACATTTTACCTGAATTCGTAATCCATAACAAC
AACTATTCCGCATCTGAAAAAGAGGAGAAGACCCAAGTTATCAAACTTTTTTCACGTTTCGCGACATCTTTTAAAGACTACTTT
AAGAATCGTGCGAATTGTTTCAGTGCAGATGATATTTCGTCTAGTTCATGTCACCGTATCGTGAATGACAACGCTGAGATTTTC
TTTTCTAATGCGTTGGTGTATCGCCGCATCGTAAAGTCCTTGTCGAATGATGATATCAACAAAATTAGTGGTGACATGAAAGAC
TCCCTGAAAGAAATGTCATTAGAGGAGATTTACAGCTACGAAAAATACGGAGAGTTCATCACTCAGGAAGGTATCTCCTTTTAC
AACGATATTTGCGGCAAAGTTAATAGTTTCATGAATCTGTATTGTCAGAAGAATAAGGAAAACAAGAATCTGTACAAGTTACAA
AAGCTTCATAAACAGATCTTGTGCATCGCCGACACGTCTTATGAAGTCCCGTATAAATTTGAAAGCGACGAAGAAGTATATCAG
AGTGTGAATGGATTCTTGGACAATATCTCATCAAAACACATTGTTGAACGTTTGCGCAAAATCGGCGACAACTATAACGGATAC
AACTTGGATAAAATTTATATCGTATCAAAATTTTATGAATCAGTATCCCAAAAGACTTACCGTGATTGGGAGACTATTAATACG
GCGTTAGAAATCCATTACAACAACATTCTGCCGGGTAACGGTAAATCGAAAGCGGACAAAGTGAAGAAGGCGGTTAAGAACGAT
CTTCAGAAGTCTATCACGGAGATTAATGAGCTGGTTTCCAATTACAAGTTGTGCTCGGATGATAACATCAAAGCTGAAACCTAT
ATCCATGAAATTTCTCATATTCTTAATAACTTCGAGGCACAAGAATTAAAATATAACCCAGAAATTCATCTGGTTGAGAGCGAA
CTTAAAGCTTCAGAATTAAAAAATGTTTTGGACGTAATTATGAACGCCTTCCATTGGTGCAGCAAATTTATGACAGAGGAGTTA
GTAGATAAGGATAACAACTTTTATGCAGAATTGGAAGAGATCTATGATGAGATCTATCCAGTGATTTCACTGTATAACTTAGTC
CGTAATTACGTCACTCAGAAGCCGTACTCAACTAAAAAGATCAAGTTAAATTTTGGAATTCCGACATTGGCGGATGGTTGGAGT
AAGTCTAAGGAATACTCAAATAACGCTATTATCTTAATGCGTGACAACCTGTATTACTTGGGTATTTTCAATGCCAAAAATAAG
CCCGATAAAAAAATCATTGAAGGGAATACTTCAGAAAATAAGGGAGATTACAAAAAAATGATTTATAACCTTTTGCCAGGCCCA
AACAAAATGATCCCCAAGGTGTTTTTGAGTAGTAAGACGGGAGTAGAAACATATAAGCCATCAGCGTACATTCTTGAAGGGTAC
AAACAAAATAAACACATCAAGAGCAGCAAGGACTTTGACATTACATTTTGTCATGACTTAATCGACTACTTTAAAAATTGCATT
GCCATTCACCCTGAGTGGAAAAATTTTGGTTTCGACTTCAGTGATACCTCTACCTATGAAGATATCTCTGGTTTTTATCGTGAG
GTAGAACTTCAGGGTTACAAGATCGATTGGACGTACATTTCCGAGAAAGACATTGATCTTTTACAAGAGAAGGGTCAGCTTTAC
TTATTTCAGATCTACAATAAAGACTTTTCGAAAAAATCCACGGGCAACGACAACCTTCATACAATGTACTTAAAGAACCTGTTC
TCTGAAGAAAACTTGAAAGATATCGTGCTTAAATTGAATGGCGAGGCCGAGATTTTTTTCCGTAAAAGCTCGATTAAGAATCCC
ATCATCCACAAGAAAGGCAGCATTCTGGTAAATCGTACCTATGAAGCGGAGGAAAAGGACCAATTTGGTAATATTCAGATTGTC
CGTAAGAACATCCCTGAAAATATCTATCAAGAATTATATAAATATTTCAACGATAAGTCGGACAAGGAACTTAGCGATGAAGCC
GCGAAGTTGAAAAATGTTGTTGGTCACCACGAAGCAGCAACAAACATTGTGAAAGACTATCGCTACACTTACGATAAGTACTTT
TTACATATGCCTATTACGATTAACTTTAAGGCAAATAAGACAGGTTTTATCAACGACCGTATCCTGCAATATATTGCAAAAGAG
AAGGACCTGCATGTCATTGGGATTGATCGCGGTGAACGCAATCTGATTTACGTGAGTGTTATTGATACCTGCGGTAATATTGTT
GAGCAAAAGTCTTTTAATATCGTTAATGGTTACGACTACCAAATTAAGCTTAAACAACAGGAAGGTGCCCGCCAGATCGCCCGT
AAGGAGTGGAAGGAAATCGGAAAAATTAAGGAAATCAAAGAGGGATATCTGAGCTTGGTTATTCATGAAATCTCAAAGATGGTT
ATTAAGTACAACGCCATCATCGCTATGGAAGACTTATCGTATGGGTTTAAAAAGGGTCGTTTCAAAGTTGAGCGCCAGGTCTAC
CAAAAGTTTGAAACGATGCTTATTAATAAATTAAACTACTTGGTTTTCAAAGATATCTCTATTACCGAGAATGGAGGTTTACTG
AAAGGATACCAGTTAACGTATATCCCCGATAAGCTTAAAAACGTGGGCCATCAGTGTGGCTGTATTTTCTATGTGCCCGCGGCA
TATACATCAAAAATTGACCCGACGACGGGTTTCGTTAATATCTTCAAGTTCAAAGATCTGACAGTTGATGCAAAACGCGAATTC
ATTAAGAAGTTCGATAGTATTCGCTATGACTCCGAGAAAAATTTGTTTTGCTTCACTTTTGACTACAATAACTTTATTACTCAG
AATACAGTCATGAGTAAAAGCTCCTGGTCGGTTTACACGTACGGGGTACGCATCAAACGTCGTTTTGTGAATGGTCGTTTTAGT
AATGAGTCGGATACAATTGATATTACCAAGGATATGGAGAAGACTCTGGAAATGACAGACATCAATTGGCGTGATGGACATGAT
TTGCGTCAGGACATTATCGACTATGAGATTGTGCAGCATATTTTCGAAATTTTTCGCCTGACGGTGCAAATGCGTAATTCCTTA
AGCGAACTGGAAGATCGCGACTATGACCGCTTAATTTCTCCTGTGCTGAATGAGAACAACATCTTCTATGACTCAGCGAAAGCC
GGGGACGCTTTGCCAAAGGATGCAGATGCTAACGGTGCATATTGTATTGCTCTGAAAGGCCTTTACGAGATCAAACAAATTACT
GAAAACTGGAAGGAAGATGGAAAGTTTTCCCGTGATAAATTGAAGATCTCTAATAAGGACTGGTTTGACTTTATCCAAAATAAA
CGTTATTTA
ErCas12a-V470K-AA (SEQ ID NO: 56)
MNNGTNNFQNFIGISSLQKTLRNALIPTETTQQFIVKNGIIKEDELRGENRQILKDIMDDYYRGFISETLSSIDDIDWTSLFEK
MEIQLKNGDNKDTLIKEQTEYRKAIHKKFANDDRFKNMFSAKLISDILPEFVIHNNNYSASEKEEKTQVIKLFSRFATSFKDYF
KNRANCESADDISSSSCHRIVNDNAEIFFSNALVYRRIVKSLSNDDINKISGDMKDSLKEMSLEEIYSYEKYGEFITQEGISFY
NDICGKVNSFMNLYCQKNKENKNLYKLQKLHKQILCIADTSYEVPYKFESDEEVYQSVNGELDNISSKHIVERLRKIGDNYNGY
NLDKIYIVSKFYESVSQKTYRDWETINTALEIHYNNILPGNGKSKADKVKKAVKNDLQKSITEINELVSNYKLCSDDNIKAETY
IHEISHILNNFEAQELKYNPEIHLVESELKASELKNVLDVIMNAFHWCSKFMTEELVDKDNNFYAELEEIYDEIYPVISLYNLV
RNYVTQKPYSTKKIKLNFGIPTLADGWSKSKEYSNNAIILMRDNLYYLGIFNAKNKPDKKIIEGNTSENKGDYKKMIYNLLPGP
NKMIPKVFLSSKTGVETYKPSAYILEGYKQNKHIKSSKDFDITFCHDLIDYFKNCIAIHPEWKNFGFDFSDTSTYEDISGFYRE
VELQGYKIDWTYISEKDIDLLQEKGQLYLFQIYNKDFSKKSTGNDNLHTMYLKNLFSEENLKDIVLKLNGEAEIFFRKSSIKNP
IIHKKGSILVNRTYEAEEKDQFGNIQIVRKNIPENIYQELYKYFNDKSDKELSDEAAKLKNVVGHHEAATNIVKDYRYTYDKYF
LHMPITINFKANKTGFINDRILQYIAKEKDLHVIGIDRGERNLIYVSVIDTCGNIVEQKSFNIVNGYDYQIKLKQQEGARQIAR
KEWKEIGKIKEIKEGYLSLVIHEISKMVIKYNAIIAMEDLSYGFKKGRFKVERQVYQKFETMLINKLNYLVFKDISITENGGLL
KGYQLTYIPDKLKNVGHQCGCIFYVPAAYTSKIDPTTGFVNIFKFKDLTVDAKREFIKKFDSIRYDSEKNLFCFTFDYNNFITQ
NTVMSKSSWSVYTYGVRIKRRFVNGRFSNESDTIDITKDMEKTLEMTDINWRDGHDLRQDIIDYEIVQHIFEIFRLTVQMRNSL
SELEDRDYDRLISPVLNENNIFYDSAKAGDALPKDADANGAYCIALKGLYEIKQITENWKEDGKFSRDKLKISNKDWFDFIQNK
RYL
ErCas12a-1498K-NT (SEQ ID NO: 57)
atgAATAACGGTACCAATAACTTTCAAAATTTTATCGGGATCTCCTCGTTGCAAAAAACTCTTCGTAATGCTTTAATCCCGACT
GAGACAACACAGCAGTTCATCGTTAAAAACGGCATCATTAAAGAAGATGAGCTGCGCGGCGAGAACCGTCAGATTTTAAAGGAC
ATCATGGACGACTATTACCGTGGGTTCATCTCAGAAACATTAAGCAGCATCGATGATATCGACTGGACCTCACTGTTTGAGAAG
ATGGAGATTCAACTTAAGAATGGAGACAACAAAGACACTTTAATTAAGGAGCAGACGGAATATCGTAAAGCTATCCATAAAAAA
TTTGCAAACGATGACCGTTTCAAAAATATGTTTTCCGCAAAATTGATTAGCGACATTTTACCTGAATTCGTAATCCATAACAAC
AACTATTCCGCATCTGAAAAAGAGGAGAAGACCCAAGTTATCAAACTTTTTTCACGTTTCGCGACATCTTTTAAAGACTACTTT
AAGAATCGTGCGAATTGTTTCAGTGCAGATGATATTTCGTCTAGTTCATGTCACCGTATCGTGAATGACAACGCTGAGATTTTC
TTTTCTAATGCGTTGGTGTATCGCCGCATCGTAAAGTCCTTGTCGAATGATGATATCAACAAAATTAGTGGTGACATGAAAGAC
TCCCTGAAAGAAATGTCATTAGAGGAGATTTACAGCTACGAAAAATACGGAGAGTTCATCACTCAGGAAGGTATCTCCTTTTAC
AACGATATTTGCGGCAAAGTTAATAGTTTCATGAATCTGTATTGTCAGAAGAATAAGGAAAACAAGAATCTGTACAAGTTACAA
AAGCTTCATAAACAGATCTTGTGCATCGCCGACACGTCTTATGAAGTCCCGTATAAATTTGAAAGCGACGAAGAAGTATATCAG
AGTGTGAATGGATTCTTGGACAATATCTCATCAAAACACATTGTTGAACGTTTGCGCAAAATCGGCGACAACTATAACGGATAC
AACTTGGATAAAATTTATATCGTATCAAAATTTTATGAATCAGTATCCCAAAAGACTTACCGTGATTGGGAGACTATTAATACG
GCGTTAGAAATCCATTACAACAACATTCTGCCGGGTAACGGTAAATCGAAAGCGGACAAAGTGAAGAAGGCGGTTAAGAACGAT
CTTCAGAAGTCTATCACGGAGATTAATGAGCTGGTTTCCAATTACAAGTTGTGCTCGGATGATAACATCAAAGCTGAAACCTAT
ATCCATGAAATTTCTCATATTCTTAATAACTTCGAGGCACAAGAATTAAAATATAACCCAGAAATTCATCTGGTTGAGAGCGAA
CTTAAAGCTTCAGAATTAAAAAATGTTTTGGACGTAATTATGAACGCCTTCCATTGGTGCAGCGTGTTTATGACAGAGGAGTTA
GTAGATAAGGATAACAACTTTTATGCAGAATTGGAAGAGATCTATGATGAGATCTATCCAGTGAAATCACTGTATAACTTAGTC
CGTAATTACGTCACTCAGAAGCCGTACTCAACTAAAAAGATCAAGTTAAATTTTGGAATTCCGACATTGGCGGATGGTTGGAGT
AAGTCTAAGGAATACTCAAATAACGCTATTATCTTAATGCGTGACAACCTGTATTACTTGGGTATTTTCAATGCCAAAAATAAG
CCCGATAAAAAAATCATTGAAGGGAATACTTCAGAAAATAAGGGAGATTACAAAAAAATGATTTATAACCTTTTGCCAGGCCCA
AACAAAATGATCCCCAAGGTGTTTTTGAGTAGTAAGACGGGAGTAGAAACATATAAGCCATCAGCGTACATTCTTGAAGGGTAC
AAACAAAATAAACACATCAAGAGCAGCAAGGACTTTGACATTACATTTTGTCATGACTTAATCGACTACTTTAAAAATTGCATT
GCCATTCACCCTGAGTGGAAAAATTTTGGTTTCGACTTCAGTGATACCTCTACCTATGAAGATATCTCTGGTTTTTATCGTGAG
GTAGAACTTCAGGGTTACAAGATCGATTGGACGTACATTTCCGAGAAAGACATTGATCTTTTACAAGAGAAGGGTCAGCTTTAC
TTATTTCAGATCTACAATAAAGACTTTTCGAAAAAATCCACGGGCAACGACAACCTTCATACAATGTACTTAAAGAACCTGTTC
TCTGAAGAAAACTTGAAAGATATCGTGCTTAAATTGAATGGCGAGGCCGAGATTTTTTTCCGTAAAAGCTCGATTAAGAATCCC
ATCATCCACAAGAAAGGCAGCATTCTGGTAAATCGTACCTATGAAGCGGAGGAAAAGGACCAATTTGGTAATATTCAGATTGTC
CGTAAGAACATCCCTGAAAATATCTATCAAGAATTATATAAATATTTCAACGATAAGTCGGACAAGGAACTTAGCGATGAAGCC
GCGAAGTTGAAAAATGTTGTTGGTCACCACGAAGCAGCAACAAACATTGTGAAAGACTATCGCTACACTTACGATAAGTACTTT
TTACATATGCCTATTACGATTAACTTTAAGGCAAATAAGACAGGTTTTATCAACGACCGTATCCTGCAATATATTGCAAAAGAG
AAGGACCTGCATGTCATTGGGATTGATCGCGGTGAACGCAATCTGATTTACGTGAGTGTTATTGATACCTGCGGTAATATTGTT
GAGCAAAAGTCTTTTAATATCGTTAATGGTTACGACTACCAAATTAAGCTTAAACAACAGGAAGGTGCCCGCCAGATCGCCCGT
AAGGAGTGGAAGGAAATCGGAAAAATTAAGGAAATCAAAGAGGGATATCTGAGCTTGGTTATTCATGAAATCTCAAAGATGGTT
ATTAAGTACAACGCCATCATCGCTATGGAAGACTTATCGTATGGGTTTAAAAAGGGTCGTTTCAAAGTTGAGCGCCAGGTCTAC
CAAAAGTTTGAAACGATGCTTATTAATAAATTAAACTACTTGGTTTTCAAAGATATCTCTATTACCGAGAATGGAGGTTTACTG
AAAGGATACCAGTTAACGTATATCCCCGATAAGCTTAAAAACGTGGGCCATCAGTGTGGCTGTATTTTCTATGTGCCCGCGGCA
TATACATCAAAAATTGACCCGACGACGGGTTTCGTTAATATCTTCAAGTTCAAAGATCTGACAGTTGATGCAAAACGCGAATTC
ATTAAGAAGTTCGATAGTATTCGCTATGACTCCGAGAAAAATTTGTTTTGCTTCACTTTTGACTACAATAACTTTATTACTCAG
AATACAGTCATGAGTAAAAGCTCCTGGTCGGTTTACACGTACGGGGTACGCATCAAACGTCGTTTTGTGAATGGTCGTTTTAGT
AATGAGTCGGATACAATTGATATTACCAAGGATATGGAGAAGACTCTGGAAATGACAGACATCAATTGGCGTGATGGACATGAT
TTGCGTCAGGACATTATCGACTATGAGATTGTGCAGCATATTTTCGAAATTTTTCGCCTGACGGTGCAAATGCGTAATTCCTTA
AGCGAACTGGAAGATCGCGACTATGACCGCTTAATTTCTCCTGTGCTGAATGAGAACAACATCTTCTATGACTCAGCGAAAGCC
GGGGACGCTTTGCCAAAGGATGCAGATGCTAACGGTGCATATTGTATTGCTCTGAAAGGCCTTTACGAGATCAAACAAATTACT
GAAAACTGGAAGGAAGATGGAAAGTTTTCCCGTGATAAATTGAAGATCTCTAATAAGGACTGGTTTGACTTTATCCAAAATAAA
CGTTATTTA
ErCas12a-1498K-AA (SEQ ID NO: 58)
MNNGTNNFQNFIGISSLQKTLRNALIPTETTQQFIVKNGIIKEDELRGENRQILKDIMDDYYRGFISETLSSIDDIDWTSLFEK
MEIQLKNGDNKDTLIKEQTEYRKAIHKKFANDDRFKNMFSAKLISDILPEFVIHNNNYSASEKEEKTQVIKLFSRFATSFKDYF
KNRANCFSADDISSSSCHRIVNDNAEIFFSNALVYRRIVKSLSNDDINKISGDMKDSLKEMSLEEIYSYEKYGEFITQEGISFY
NDICGKVNSFMNLYCQKNKENKNLYKLQKLHKQILCIADTSYEVPYKFESDEEVYQSVNGELDNISSKHIVERLRKIGDNYNGY
NLDKIYIVSKFYESVSQKTYRDWETINTALEIHYNNILPGNGKSKADKVKKAVKNDLQKSITEINELVSNYKLCSDDNIKAETY
IHEISHILNNFEAQELKYNPEIHLVESELKASELKNVLDVIMNAFHWCSVFMTEELVDKDNNFYAELEEIYDEIYPVKSLYNLV
RNYVTQKPYSTKKIKLNFGIPTLADGWSKSKEYSNNAIILMRDNLYYLGIFNAKNKPDKKIIEGNTSENKGDYKKMIYNLLPGP
NKMIPKVFLSSKTGVETYKPSAYILEGYKQNKHIKSSKDFDITFCHDLIDYFKNCIAIHPEWKNFGFDFSDTSTYEDISGFYRE
VELQGYKIDWTYISEKDIDLLQEKGQLYLFQIYNKDFSKKSTGNDNLHTMYLKNLFSEENLKDIVLKLNGEAEIFFRKSSIKNP
IIHKKGSILVNRTYEAEEKDQFGNIQIVRKNIPENIYQELYKYENDKSDKELSDEAAKLKNVVGHHEAATNIVKDYRYTYDKYF
LHMPITINFKANKTGFINDRILQYIAKEKDLHVIGIDRGERNLIYVSVIDTCGNIVEQKSFNIVNGYDYQIKLKQQEGARQIAR
KEWKEIGKIKEIKEGYLSLVIHEISKMVIKYNAIIAMEDLSYGFKKGRFKVERQVYQKFETMLINKLNYLVFKDISITENGGLL
KGYQLTYIPDKLKNVGHQCGCIFYVPAAYTSKIDPTTGFVNIFKFKDLTVDAKREFIKKFDSIRYDSEKNLFCFTFDYNNFITQ
NTVMSKSSWSVYTYGVRIKRRFVNGRFSNESDTIDITKDMEKTLEMTDINWRDGHDLRQDIIDYEIVQHIFEIFRLTVQMRNSL
SELEDRDYDRLISPVLNENNIFYDSAKAGDALPKDADANGAYCIALKGLYEIKQITENWKEDGKFSRDKLKISNKDWFDFIQNK
RYL
ErCas12a-Y507W-NT (SEQ ID NO: 59)
atgAATAACGGTACCAATAACTTTCAAAATTTTATCGGGATCTCCTCGTTGCAAAAAACTCTTCGTAATGCTTTAATCCCGACT
GAGACAACACAGCAGTTCATCGTTAAAAACGGCATCATTAAAGAAGATGAGCTGCGCGGCGAGAACCGTCAGATTTTAAAGGAC
ATCATGGACGACTATTACCGTGGGTTCATCTCAGAAACATTAAGCAGCATCGATGATATCGACTGGACCTCACTGTTTGAGAAG
ATGGAGATTCAACTTAAGAATGGAGACAACAAAGACACTTTAATTAAGGAGCAGACGGAATATCGTAAAGCTATCCATAAAAAA
TTTGCAAACGATGACCGTTTCAAAAATATGTTTTCCGCAAAATTGATTAGCGACATTTTACCTGAATTCGTAATCCATAACAAC
AACTATTCCGCATCTGAAAAAGAGGAGAAGACCCAAGTTATCAAACTTTTTTCACGTTTCGCGACATCTTTTAAAGACTACTTT
AAGAATCGTGCGAATTGTTTCAGTGCAGATGATATTTCGTCTAGTTCATGTCACCGTATCGTGAATGACAACGCTGAGATTTTC
TTTTCTAATGCGTTGGTGTATCGCCGCATCGTAAAGTCCTTGTCGAATGATGATATCAACAAAATTAGTGGTGACATGAAAGAC
TCCCTGAAAGAAATGTCATTAGAGGAGATTTACAGCTACGAAAAATACGGAGAGTTCATCACTCAGGAAGGTATCTCCTTTTAC
AACGATATTTGCGGCAAAGTTAATAGTTTCATGAATCTGTATTGTCAGAAGAATAAGGAAAACAAGAATCTGTACAAGTTACAA
AAGCTTCATAAACAGATCTTGTGCATCGCCGACACGTCTTATGAAGTCCCGTATAAATTTGAAAGCGACGAAGAAGTATATCAG
AGTGTGAATGGATTCTTGGACAATATCTCATCAAAACACATTGTTGAACGTTTGCGCAAAATCGGCGACAACTATAACGGATAC
AACTTGGATAAAATTTATATCGTATCAAAATTTTATGAATCAGTATCCCAAAAGACTTACCGTGATTGGGAGACTATTAATACG
GCGTTAGAAATCCATTACAACAACATTCTGCCGGGTAACGGTAAATCGAAAGCGGACAAAGTGAAGAAGGCGGTTAAGAACGAT
CTTCAGAAGTCTATCACGGAGATTAATGAGCTGGTTTCCAATTACAAGTTGTGCTCGGATGATAACATCAAAGCTGAAACCTAT
ATCCATGAAATTTCTCATATTCTTAATAACTTCGAGGCACAAGAATTAAAATATAACCCAGAAATTCATCTGGTTGAGAGCGAA
CTTAAAGCTTCAGAATTAAAAAATGTTTTGGACGTAATTATGAACGCCTTCCATTGGTGCAGCGTGTTTATGACAGAGGAGTTA
GTAGATAAGGATAACAACTTTTATGCAGAATTGGAAGAGATCTATGATGAGATCTATCCAGTGATTTCACTGTATAACTTAGTC
CGTAATTGGGTCACTCAGAAGCCGTACTCAACTAAAAAGATCAAGTTAAATTTTGGAATTCCGACATTGGCGGATGGTTGGAGT
AAGTCTAAGGAATACTCAAATAACGCTATTATCTTAATGCGTGACAACCTGTATTACTTGGGTATTTTCAATGCCAAAAATAAG
CCCGATAAAAAAATCATTGAAGGGAATACTTCAGAAAATAAGGGAGATTACAAAAAAATGATTTATAACCTTTTGCCAGGCCCA
AACAAAATGATCCCCAAGGTGTTTTTGAGTAGTAAGACGGGAGTAGAAACATATAAGCCATCAGCGTACATTCTTGAAGGGTAC
AAACAAAATAAACACATCAAGAGCAGCAAGGACTTTGACATTACATTTTGTCATGACTTAATCGACTACTTTAAAAATTGCATT
GCCATTCACCCTGAGTGGAAAAATTTTGGTTTCGACTTCAGTGATACCTCTACCTATGAAGATATCTCTGGTTTTTATCGTGAG
GTAGAACTTCAGGGTTACAAGATCGATTGGACGTACATTTCCGAGAAAGACATTGATCTTTTACAAGAGAAGGGTCAGCTTTAC
TTATTTCAGATCTACAATAAAGACTTTTCGAAAAAATCCACGGGCAACGACAACCTTCATACAATGTACTTAAAGAACCTGTTC
TCTGAAGAAAACTTGAAAGATATCGTGCTTAAATTGAATGGCGAGGCCGAGATTTTTTTCCGTAAAAGCTCGATTAAGAATCCC
ATCATCCACAAGAAAGGCAGCATTCTGGTAAATCGTACCTATGAAGCGGAGGAAAAGGACCAATTTGGTAATATTCAGATTGTC
CGTAAGAACATCCCTGAAAATATCTATCAAGAATTATATAAATATTTCAACGATAAGTCGGACAAGGAACTTAGCGATGAAGCC
GCGAAGTTGAAAAATGTTGTTGGTCACCACGAAGCAGCAACAAACATTGTGAAAGACTATCGCTACACTTACGATAAGTACTTT
TTACATATGCCTATTACGATTAACTTTAAGGCAAATAAGACAGGTTTTATCAACGACCGTATCCTGCAATATATTGCAAAAGAG
AAGGACCTGCATGTCATTGGGATTGATCGCGGTGAACGCAATCTGATTTACGTGAGTGTTATTGATACCTGCGGTAATATTGTT
GAGCAAAAGTCTTTTAATATCGTTAATGGTTACGACTACCAAATTAAGCTTAAACAACAGGAAGGTGCCCGCCAGATCGCCCGT
AAGGAGTGGAAGGAAATCGGAAAAATTAAGGAAATCAAAGAGGGATATCTGAGCTTGGTTATTCATGAAATCTCAAAGATGGTT
ATTAAGTACAACGCCATCATCGCTATGGAAGACTTATCGTATGGGTTTAAAAAGGGTCGTTTCAAAGTTGAGCGCCAGGTCTAC
CAAAAGTTTGAAACGATGCTTATTAATAAATTAAACTACTTGGTTTTCAAAGATATCTCTATTACCGAGAATGGAGGTTTACTG
AAAGGATACCAGTTAACGTATATCCCCGATAAGCTTAAAAACGTGGGCCATCAGTGTGGCTGTATTTTCTATGTGCCCGCGGCA
TATACATCAAAAATTGACCCGACGACGGGTTTCGTTAATATCTTCAAGTTCAAAGATCTGACAGTTGATGCAAAACGCGAATTC
ATTAAGAAGTTCGATAGTATTCGCTATGACTCCGAGAAAAATTTGTTTTGCTTCACTTTTGACTACAATAACTTTATTACTCAG
AATACAGTCATGAGTAAAAGCTCCTGGTCGGTTTACACGTACGGGGTACGCATCAAACGTCGTTTTGTGAATGGTCGTTTTAGT
AATGAGTCGGATACAATTGATATTACCAAGGATATGGAGAAGACTCTGGAAATGACAGACATCAATTGGCGTGATGGACATGAT
TTGCGTCAGGACATTATCGACTATGAGATTGTGCAGCATATTTTCGAAATTTTTCGCCTGACGGTGCAAATGCGTAATTCCTTA
AGCGAACTGGAAGATCGCGACTATGACCGCTTAATTTCTCCTGTGCTGAATGAGAACAACATCTTCTATGACTCAGCGAAAGCC
GGGGACGCTTTGCCAAAGGATGCAGATGCTAACGGTGCATATTGTATTGCTCTGAAAGGCCTTTACGAGATCAAACAAATTACT
GAAAACTGGAAGGAAGATGGAAAGTTTTCCCGTGATAAATTGAAGATCTCTAATAAGGACTGGTTTGACTTTATCCAAAATAAA
CGTTATTTA
ErCas12a-Y507W-AA (SEQ ID NO: 60)
MNNGTNNFQNFIGISSLQKTLRNALIPTETTQQFIVKNGIIKEDELRGENRQILKDIMDDYYRGFISETLSSIDDIDWTSLFEK
MEIQLKNGDNKDTLIKEQTEYRKAIHKKFANDDRFKNMFSAKLISDILPEFVIHNNNYSASEKEEKTQVIKLESRFATSFKDYF
KNRANCFSADDISSSSCHRIVNDNAEIFFSNALVYRRIVKSLSNDDINKISGDMKDSLKEMSLEEIYSYEKYGEFITQEGISFY
NDICGKVNSFMNLYCQKNKENKNLYKLQKLHKQILCIADTSYEVPYKFESDEEVYQSVNGELDNISSKHIVERLRKIGDNYNGY
NLDKIYIVSKFYESVSQKTYRDWETINTALEIHYNNILPGNGKSKADKVKKAVKNDLQKSITEINELVSNYKLCSDDNIKAETY
IHEISHILNNFEAQELKYNPEIHLVESELKASELKNVLDVIMNAFHWCSVFMTEELVDKDNNFYAELEEIYDEIYPVISLYNLV
RNWVTQKPYSTKKIKLNFGIPTLADGWSKSKEYSNNAIILMRDNLYYLGIFNAKNKPDKKIIEGNTSENKGDYKKMIYNLLPGP
NKMIPKVFLSSKTGVETYKPSAYILEGYKQNKHIKSSKDFDITFCHDLIDYFKNCIAIHPEWKNFGFDESDTSTYEDISGFYRE
VELQGYKIDWTYISEKDIDLLQEKGQLYLFQIYNKDFSKKSTGNDNLHTMYLKNLFSEENLKDIVLKLNGEAEIFFRKSSIKNP
IIHKKGSILVNRTYEAEEKDQFGNIQIVRKNIPENIYQELYKYFNDKSDKELSDEAAKLKNVVGHHEAATNIVKDYRYTYDKYF
LHMPITINFKANKTGFINDRILQYIAKEKDLHVIGIDRGERNLIYVSVIDTCGNIVEQKSFNIVNGYDYQIKLKQQEGARQIAR
KEWKEIGKIKEIKEGYLSLVIHEISKMVIKYNAIIAMEDLSYGFKKGRFKVERQVYQKFETMLINKLNYLVFKDISITENGGLL
KGYQLTYIPDKLKNVGHQCGCIFYVPAAYTSKIDPTTGFVNIFKFKDLTVDAKREFIKKFDSIRYDSEKNLFCFTFDYNNFITQ
NTVMSKSSWSVYTYGVRIKRRFVNGRFSNESDTIDITKDMEKTLEMTDINWRDGHDLRQDIIDYEIVQHIFEIFRLTVQMRNSL
SELEDRDYDRLISPVLNENNIFYDSAKAGDALPKDADANGAYCIALKGLYEIKQITENWKEDGKFSRDKLKISNKDWEDFIQNK
RYL
ErCas12a-Y507S-NT (SEQ ID NO: 61)
atgAATAACGGTACCAATAACTTTCAAAATTTTATCGGGATCTCCTCGTTGCAAAAAACTCTTCGTAATGCTTTAATCCCGACT
GAGACAACACAGCAGTTCATCGTTAAAAACGGCATCATTAAAGAAGATGAGCTGCGCGGCGAGAACCGTCAGATTTTAAAGGAC
ATCATGGACGACTATTACCGTGGGTTCATCTCAGAAACATTAAGCAGCATCGATGATATCGACTGGACCTCACTGTTTGAGAAG
ATGGAGATTCAACTTAAGAATGGAGACAACAAAGACACTTTAATTAAGGAGCAGACGGAATATCGTAAAGCTATCCATAAAAAA
TTTGCAAACGATGACCGTTTCAAAAATATGTTTTCCGCAAAATTGATTAGCGACATTTTACCTGAATTCGTAATCCATAACAAC
AACTATTCCGCATCTGAAAAAGAGGAGAAGACCCAAGTTATCAAACTTTTTTCACGTTTCGCGACATCTTTTAAAGACTACTTT
AAGAATCGTGCGAATTGTTTCAGTGCAGATGATATTTCGTCTAGTTCATGTCACCGTATCGTGAATGACAACGCTGAGATTTTC
TTTTCTAATGCGTTGGTGTATCGCCGCATCGTAAAGTCCTTGTCGAATGATGATATCAACAAAATTAGTGGTGACATGAAAGAC
TCCCTGAAAGAAATGTCATTAGAGGAGATTTACAGCTACGAAAAATACGGAGAGTTCATCACTCAGGAAGGTATCTCCTTTTAC
AACGATATTTGCGGCAAAGTTAATAGTTTCATGAATCTGTATTGTCAGAAGAATAAGGAAAACAAGAATCTGTACAAGTTACAA
AAGCTTCATAAACAGATCTTGTGCATCGCCGACACGTCTTATGAAGTCCCGTATAAATTTGAAAGCGACGAAGAAGTATATCAG
AGTGTGAATGGATTCTTGGACAATATCTCATCAAAACACATTGTTGAACGTTTGCGCAAAATCGGCGACAACTATAACGGATAC
AACTTGGATAAAATTTATATCGTATCAAAATTTTATGAATCAGTATCCCAAAAGACTTACCGTGATTGGGAGACTATTAATACG
GCGTTAGAAATCCATTACAACAACATTCTGCCGGGTAACGGTAAATCGAAAGCGGACAAAGTGAAGAAGGCGGTTAAGAACGAT
CTTCAGAAGTCTATCACGGAGATTAATGAGCTGGTTTCCAATTACAAGTTGTGCTCGGATGATAACATCAAAGCTGAAACCTAT
ATCCATGAAATTTCTCATATTCTTAATAACTTCGAGGCACAAGAATTAAAATATAACCCAGAAATTCATCTGGTTGAGAGCGAA
CTTAAAGCTTCAGAATTAAAAAATGTTTTGGACGTAATTATGAACGCCTTCCATTGGTGCAGCGTGTTTATGACAGAGGAGTTA
GTAGATAAGGATAACAACTTTTATGCAGAATTGGAAGAGATCTATGATGAGATCTATCCAGTGATTTCACTGTATAACTTAGTC
CGTAATAGCGTCACTCAGAAGCCGTACTCAACTAAAAAGATCAAGTTAAATTTTGGAATTCCGACATTGGCGGATGGTTGGAGT
AAGTCTAAGGAATACTCAAATAACGCTATTATCTTAATGCGTGACAACCTGTATTACTTGGGTATTTTCAATGCCAAAAATAAG
CCCGATAAAAAAATCATTGAAGGGAATACTTCAGAAAATAAGGGAGATTACAAAAAAATGATTTATAACCTTTTGCCAGGCCCA
AACAAAATGATCCCCAAGGTGTTTTTGAGTAGTAAGACGGGAGTAGAAACATATAAGCCATCAGCGTACATTCTTGAAGGGTAC
AAACAAAATAAACACATCAAGAGCAGCAAGGACTTTGACATTACATTTTGTCATGACTTAATCGACTACTTTAAAAATTGCATT
GCCATTCACCCTGAGTGGAAAAATTTTGGTTTCGACTTCAGTGATACCTCTACCTATGAAGATATCTCTGGTTTTTATCGTGAG
GTAGAACTTCAGGGTTACAAGATCGATTGGACGTACATTTCCGAGAAAGACATTGATCTTTTACAAGAGAAGGGTCAGCTTTAC
TTATTTCAGATCTACAATAAAGACTTTTCGAAAAAATCCACGGGCAACGACAACCTTCATACAATGTACTTAAAGAACCTGTTC
TCTGAAGAAAACTTGAAAGATATCGTGCTTAAATTGAATGGCGAGGCCGAGATTTTTTTCCGTAAAAGCTCGATTAAGAATCCC
ATCATCCACAAGAAAGGCAGCATTCTGGTAAATCGTACCTATGAAGCGGAGGAAAAGGACCAATTTGGTAATATTCAGATTGTC
CGTAAGAACATCCCTGAAAATATCTATCAAGAATTATATAAATATTTCAACGATAAGTCGGACAAGGAACTTAGCGATGAAGCC
GCGAAGTTGAAAAATGTTGTTGGTCACCACGAAGCAGCAACAAACATTGTGAAAGACTATCGCTACACTTACGATAAGTACTTT
TTACATATGCCTATTACGATTAACTTTAAGGCAAATAAGACAGGTTTTATCAACGACCGTATCCTGCAATATATTGCAAAAGAG
AAGGACCTGCATGTCATTGGGATTGATCGCGGTGAACGCAATCTGATTTACGTGAGTGTTATTGATACCTGCGGTAATATTGTT
GAGCAAAAGTCTTTTAATATCGTTAATGGTTACGACTACCAAATTAAGCTTAAACAACAGGAAGGTGCCCGCCAGATCGCCCGT
AAGGAGTGGAAGGAAATCGGAAAAATTAAGGAAATCAAAGAGGGATATCTGAGCTTGGTTATTCATGAAATCTCAAAGATGGTT
ATTAAGTACAACGCCATCATCGCTATGGAAGACTTATCGTATGGGTTTAAAAAGGGTCGTTTCAAAGTTGAGCGCCAGGTCTAC
CAAAAGTTTGAAACGATGCTTATTAATAAATTAAACTACTTGGTTTTCAAAGATATCTCTATTACCGAGAATGGAGGTTTACTG
AAAGGATACCAGTTAACGTATATCCCCGATAAGCTTAAAAACGTGGGCCATCAGTGTGGCTGTATTTTCTATGTGCCCGCGGCA
TATACATCAAAAATTGACCCGACGACGGGTTTCGTTAATATCTTCAAGTTCAAAGATCTGACAGTTGATGCAAAACGCGAATTC
ATTAAGAAGTTCGATAGTATTCGCTATGACTCCGAGAAAAATTTGTTTTGCTTCACTTTTGACTACAATAACTTTATTACTCAG
AATACAGTCATGAGTAAAAGCTCCTGGTCGGTTTACACGTACGGGGTACGCATCAAACGTCGTTTTGTGAATGGTCGTTTTAGT
AATGAGTCGGATACAATTGATATTACCAAGGATATGGAGAAGACTCTGGAAATGACAGACATCAATTGGCGTGATGGACATGAT
TTGCGTCAGGACATTATCGACTATGAGATTGTGCAGCATATTTTCGAAATTTTTCGCCTGACGGTGCAAATGCGTAATTCCTTA
AGCGAACTGGAAGATCGCGACTATGACCGCTTAATTTCTCCTGTGCTGAATGAGAACAACATCTTCTATGACTCAGCGAAAGCC
GGGGACGCTTTGCCAAAGGATGCAGATGCTAACGGTGCATATTGTATTGCTCTGAAAGGCCTTTACGAGATCAAACAAATTACT
GAAAACTGGAAGGAAGATGGAAAGTTTTCCCGTGATAAATTGAAGATCTCTAATAAGGACTGGTTTGACTTTATCCAAAATAAA
CGTTATTTA
ErCas12a-Y507S-AA (SEQ ID NO: 62)
MNNGTNNFQNFIGISSLQKTLRNALIPTETTQQFIVKNGIIKEDELRGENRQILKDIMDDYYRGFISETLSSIDDIDWTSLFEK
MEIQLKNGDNKDTLIKEQTEYRKAIHKKFANDDRFKNMFSAKLISDILPEFVIHNNNYSASEKEEKTQVIKLFSRFATSFKDYF
KNRANCESADDISSSSCHRIVNDNAEIFFSNALVYRRIVKSLSNDDINKISGDMKDSLKEMSLEEIYSYEKYGEFITQEGISFY
NDICGKVNSFMNLYCQKNKENKNLYKLQKLHKQILCIADTSYEVPYKFESDEEVYQSVNGELDNISSKHIVERLRKIGDNYNGY
NLDKIYIVSKFYESVSQKTYRDWETINTALEIHYNNILPGNGKSKADKVKKAVKNDLQKSITEINELVSNYKLCSDDNIKAETY
IHEISHILNNFEAQELKYNPEIHLVESELKASELKNVLDVIMNAFHWCSVFMTEELVDKDNNFYAELEEIYDEIYPVISLYNLV
RNSVTQKPYSTKKIKLNFGIPTLADGWSKSKEYSNNAIILMRDNLYYLGIFNAKNKPDKKIIEGNTSENKGDYKKMIYNLLPGP
NKMIPKVFLSSKTGVETYKPSAYILEGYKQNKHIKSSKDFDITFCHDLIDYFKNCIAIHPEWKNFGFDFSDTSTYEDISGFYRE
VELQGYKIDWTYISEKDIDLLQEKGQLYLFQIYNKDFSKKSTGNDNLHTMYLKNLFSEENLKDIVLKLNGEAEIFFRKSSIKNP
IIHKKGSILVNRTYEAEEKDQFGNIQIVRKNIPENIYQELYKYFNDKSDKELSDEAAKLKNVVGHHEAATNIVKDYRYTYDKYF
LHMPITINFKANKTGFINDRILQYIAKEKDLHVIGIDRGERNLIYVSVIDTCGNIVEQKSFNIVNGYDYQIKLKQQEGARQIAR
KEWKEIGKIKEIKEGYLSLVIHEISKMVIKYNAIIAMEDLSYGFKKGRFKVERQVYQKFETMLINKLNYLVFKDISITENGGLL
KGYQLTYIPDKLKNVGHQCGCIFYVPAAYTSKIDPTTGFVNIFKFKDLTVDAKREFIKKFDSIRYDSEKNLFCFTFDYNNFITQ
NTVMSKSSWSVYTYGVRIKRRFVNGRFSNESDTIDITKDMEKTLEMTDINWRDGHDLRQDIIDYEIVQHIFEIFRLTVQMRNSL
SELEDRDYDRLISPVLNENNIFYDSAKAGDALPKDADANGAYCIALKGLYEIKQITENWKEDGKFSRDKLKISNKDWEDFIQNK
RYL
ErCas12a-Y507R-NT (SEQ ID NO: 63)
atgAATAACGGTACCAATAACTTTCAAAATTTTATCGGGATCTCCTCGTTGCAAAAAACTCTTCGTAATGCTTTAATCCCGACT
GAGACAACACAGCAGTTCATCGTTAAAAACGGCATCATTAAAGAAGATGAGCTGCGCGGCGAGAACCGTCAGATTTTAAAGGAC
ATCATGGACGACTATTACCGTGGGTTCATCTCAGAAACATTAAGCAGCATCGATGATATCGACTGGACCTCACTGTTTGAGAAG
ATGGAGATTCAACTTAAGAATGGAGACAACAAAGACACTTTAATTAAGGAGCAGACGGAATATCGTAAAGCTATCCATAAAAAA
TTTGCAAACGATGACCGTTTCAAAAATATGTTTTCCGCAAAATTGATTAGCGACATTTTACCTGAATTCGTAATCCATAACAAC
AACTATTCCGCATCTGAAAAAGAGGAGAAGACCCAAGTTATCAAACTTTTTTCACGTTTCGCGACATCTTTTAAAGACTACTTT
AAGAATCGTGCGAATTGTTTCAGTGCAGATGATATTTCGTCTAGTTCATGTCACCGTATCGTGAATGACAACGCTGAGATTTTC
TTTTCTAATGCGTTGGTGTATCGCCGCATCGTAAAGTCCTTGTCGAATGATGATATCAACAAAATTAGTGGTGACATGAAAGAC
TCCCTGAAAGAAATGTCATTAGAGGAGATTTACAGCTACGAAAAATACGGAGAGTTCATCACTCAGGAAGGTATCTCCTTTTAC
AACGATATTTGCGGCAAAGTTAATAGTTTCATGAATCTGTATTGTCAGAAGAATAAGGAAAACAAGAATCTGTACAAGTTACAA
AAGCTTCATAAACAGATCTTGTGCATCGCCGACACGTCTTATGAAGTCCCGTATAAATTTGAAAGCGACGAAGAAGTATATCAG
AGTGTGAATGGATTCTTGGACAATATCTCATCAAAACACATTGTTGAACGTTTGCGCAAAATCGGCGACAACTATAACGGATAC
AACTTGGATAAAATTTATATCGTATCAAAATTTTATGAATCAGTATCCCAAAAGACTTACCGTGATTGGGAGACTATTAATACG
GCGTTAGAAATCCATTACAACAACATTCTGCCGGGTAACGGTAAATCGAAAGCGGACAAAGTGAAGAAGGCGGTTAAGAACGAT
CTTCAGAAGTCTATCACGGAGATTAATGAGCTGGTTTCCAATTACAAGTTGTGCTCGGATGATAACATCAAAGCTGAAACCTAT
ATCCATGAAATTTCTCATATTCTTAATAACTTCGAGGCACAAGAATTAAAATATAACCCAGAAATTCATCTGGTTGAGAGCGAA
CTTAAAGCTTCAGAATTAAAAAATGTTTTGGACGTAATTATGAACGCCTTCCATTGGTGCAGCGTGTTTATGACAGAGGAGTTA
GTAGATAAGGATAACAACTTTTATGCAGAATTGGAAGAGATCTATGATGAGATCTATCCAGTGATTTCACTGTATAACTTAGTC
CGTAATCGTGTCACTCAGAAGCCGTACTCAACTAAAAAGATCAAGTTAAATTTTGGAATTCCGACATTGGCGGATGGTTGGAGT
AAGTCTAAGGAATACTCAAATAACGCTATTATCTTAATGCGTGACAACCTGTATTACTTGGGTATTTTCAATGCCAAAAATAAG
CCCGATAAAAAAATCATTGAAGGGAATACTTCAGAAAATAAGGGAGATTACAAAAAAATGATTTATAACCTTTTGCCAGGCCCA
AACAAAATGATCCCCAAGGTGTTTTTGAGTAGTAAGACGGGAGTAGAAACATATAAGCCATCAGCGTACATTCTTGAAGGGTAC
AAACAAAATAAACACATCAAGAGCAGCAAGGACTTTGACATTACATTTTGTCATGACTTAATCGACTACTTTAAAAATTGCATT
GCCATTCACCCTGAGTGGAAAAATTTTGGTTTCGACTTCAGTGATACCTCTACCTATGAAGATATCTCTGGTTTTTATCGTGAG
GTAGAACTTCAGGGTTACAAGATCGATTGGACGTACATTTCCGAGAAAGACATTGATCTTTTACAAGAGAAGGGTCAGCTTTAC
TTATTTCAGATCTACAATAAAGACTTTTCGAAAAAATCCACGGGCAACGACAACCTTCATACAATGTACTTAAAGAACCTGTTC
TCTGAAGAAAACTTGAAAGATATCGTGCTTAAATTGAATGGCGAGGCCGAGATTTTTTTCCGTAAAAGCTCGATTAAGAATCCC
ATCATCCACAAGAAAGGCAGCATTCTGGTAAATCGTACCTATGAAGCGGAGGAAAAGGACCAATTTGGTAATATTCAGATTGTC
CGTAAGAACATCCCTGAAAATATCTATCAAGAATTATATAAATATTTCAACGATAAGTCGGACAAGGAACTTAGCGATGAAGCC
GCGAAGTTGAAAAATGTTGTTGGTCACCACGAAGCAGCAACAAACATTGTGAAAGACTATCGCTACACTTACGATAAGTACTTT
TTACATATGCCTATTACGATTAACTTTAAGGCAAATAAGACAGGTTTTATCAACGACCGTATCCTGCAATATATTGCAAAAGAG
AAGGACCTGCATGTCATTGGGATTGATCGCGGTGAACGCAATCTGATTTACGTGAGTGTTATTGATACCTGCGGTAATATTGTT
GAGCAAAAGTCTTTTAATATCGTTAATGGTTACGACTACCAAATTAAGCTTAAACAACAGGAAGGTGCCCGCCAGATCGCCCGT
AAGGAGTGGAAGGAAATCGGAAAAATTAAGGAAATCAAAGAGGGATATCTGAGCTTGGTTATTCATGAAATCTCAAAGATGGTT
ATTAAGTACAACGCCATCATCGCTATGGAAGACTTATCGTATGGGTTTAAAAAGGGTCGTTTCAAAGTTGAGCGCCAGGTCTAC
CAAAAGTTTGAAACGATGCTTATTAATAAATTAAACTACTTGGTTTTCAAAGATATCTCTATTACCGAGAATGGAGGTTTACTG
AAAGGATACCAGTTAACGTATATCCCCGATAAGCTTAAAAACGTGGGCCATCAGTGTGGCTGTATTTTCTATGTGCCCGCGGCA
TATACATCAAAAATTGACCCGACGACGGGTTTCGTTAATATCTTCAAGTTCAAAGATCTGACAGTTGATGCAAAACGCGAATTC
ATTAAGAAGTTCGATAGTATTCGCTATGACTCCGAGAAAAATTTGTTTTGCTTCACTTTTGACTACAATAACTTTATTACTCAG
AATACAGTCATGAGTAAAAGCTCCTGGTCGGTTTACACGTACGGGGTACGCATCAAACGTCGTTTTGTGAATGGTCGTTTTAGT
AATGAGTCGGATACAATTGATATTACCAAGGATATGGAGAAGACTCTGGAAATGACAGACATCAATTGGCGTGATGGACATGAT
TTGCGTCAGGACATTATCGACTATGAGATTGTGCAGCATATTTTCGAAATTTTTCGCCTGACGGTGCAAATGCGTAATTCCTTA
AGCGAACTGGAAGATCGCGACTATGACCGCTTAATTTCTCCTGTGCTGAATGAGAACAACATCTTCTATGACTCAGCGAAAGCC
GGGGACGCTTTGCCAAAGGATGCAGATGCTAACGGTGCATATTGTATTGCTCTGAAAGGCCTTTACGAGATCAAACAAATTACT
GAAAACTGGAAGGAAGATGGAAAGTTTTCCCGTGATAAATTGAAGATCTCTAATAAGGACTGGTTTGACTTTATCCAAAATAAA
CGTTATTTA
ErCas12a-Y507R-AA (SEQ ID NO: 64)
MNNGTNNFQNFIGISSLQKTLRNALIPTETTQQFIVKNGIIKEDELRGENRQILKDIMDDYYRGFISETLSSIDDIDWTSLFEK
MEIQLKNGDNKDTLIKEQTEYRKAIHKKFANDDRFKNMFSAKLISDILPEFVIHNNNYSASEKEEKTQVIKLESRFATSFKDYF
KNRANCFSADDISSSSCHRIVNDNAEIFFSNALVYRRIVKSLSNDDINKISGDMKDSLKEMSLEEIYSYEKYGEFITQEGISFY
NDICGKVNSFMNLYCQKNKENKNLYKLQKLHKQILCIADTSYEVPYKFESDEEVYQSVNGELDNISSKHIVERLRKIGDNYNGY
NLDKIYIVSKFYESVSQKTYRDWETINTALEIHYNNILPGNGKSKADKVKKAVKNDLQKSITEINELVSNYKLCSDDNIKAETY
IHEISHILNNFEAQELKYNPEIHLVESELKASELKNVLDVIMNAFHWCSVFMTEELVDKDNNFYAELEEIYDEIYPVISLYNLV
RNRVTQKPYSTKKIKLNFGIPTLADGWSKSKEYSNNAIILMRDNLYYLGIFNAKNKPDKKIIEGNTSENKGDYKKMIYNLLPGP
NKMIPKVFLSSKTGVETYKPSAYILEGYKQNKHIKSSKDFDITFCHDLIDYFKNCIAIHPEWKNFGFDFSDTSTYEDISGFYRE
VELQGYKIDWTYISEKDIDLLQEKGQLYLFQIYNKDFSKKSTGNDNLHTMYLKNLFSEENLKDIVLKLNGEAEIFFRKSSIKNP
IIHKKGSILVNRTYEAEEKDQFGNIQIVRKNIPENIYQELYKYFNDKSDKELSDEAAKLKNVVGHHEAATNIVKDYRYTYDKYF
LHMPITINFKANKTGFINDRILQYIAKEKDLHVIGIDRGERNLIYVSVIDTCGNIVEQKSFNIVNGYDYQIKLKQQEGARQIAR
KEWKEIGKIKEIKEGYLSLVIHEISKMVIKYNAIIAMEDLSYGFKKGRFKVERQVYQKFETMLINKLNYLVFKDISITENGGLL
KGYQLTYIPDKLKNVGHQCGCIFYVPAAYTSKIDPTTGFVNIFKFKDLTVDAKREFIKKFDSIRYDSEKNLFCFTFDYNNFITQ
NTVMSKSSWSVYTYGVRIKRRFVNGRFSNESDTIDITKDMEKTLEMTDINWRDGHDLRQDIIDYEIVQHIFEIFRLTVQMRNSL
SELEDRDYDRLISPVLNENNIFYDSAKAGDALPKDADANGAYCIALKGLYEIKQITENWKEDGKFSRDKLKISNKDWFDFIQNK
RYL
ErCas12a-Q510Y-NT (SEQ ID NO: 65)
atgAATAACGGTACCAATAACTTTCAAAATTTTATCGGGATCTCCTCGTTGCAAAAAACTCTTCGTAATGCTTTAATCCCGACT
GAGACAACACAGCAGTTCATCGTTAAAAACGGCATCATTAAAGAAGATGAGCTGCGCGGCGAGAACCGTCAGATTTTAAAGGAC
ATCATGGACGACTATTACCGTGGGTTCATCTCAGAAACATTAAGCAGCATCGATGATATCGACTGGACCTCACTGTTTGAGAAG
ATGGAGATTCAACTTAAGAATGGAGACAACAAAGACACTTTAATTAAGGAGCAGACGGAATATCGTAAAGCTATCCATAAAAAA
TTTGCAAACGATGACCGTTTCAAAAATATGTTTTCCGCAAAATTGATTAGCGACATTTTACCTGAATTCGTAATCCATAACAAC
AACTATTCCGCATCTGAAAAAGAGGAGAAGACCCAAGTTATCAAACTTTTTTCACGTTTCGCGACATCTTTTAAAGACTACTTT
AAGAATCGTGCGAATTGTTTCAGTGCAGATGATATTTCGTCTAGTTCATGTCACCGTATCGTGAATGACAACGCTGAGATTTTC
TTTTCTAATGCGTTGGTGTATCGCCGCATCGTAAAGTCCTTGTCGAATGATGATATCAACAAAATTAGTGGTGACATGAAAGAC
TCCCTGAAAGAAATGTCATTAGAGGAGATTTACAGCTACGAAAAATACGGAGAGTTCATCACTCAGGAAGGTATCTCCTTTTAC
AACGATATTTGCGGCAAAGTTAATAGTTTCATGAATCTGTATTGTCAGAAGAATAAGGAAAACAAGAATCTGTACAAGTTACAA
AAGCTTCATAAACAGATCTTGTGCATCGCCGACACGTCTTATGAAGTCCCGTATAAATTTGAAAGCGACGAAGAAGTATATCAG
AGTGTGAATGGATTCTTGGACAATATCTCATCAAAACACATTGTTGAACGTTTGCGCAAAATCGGCGACAACTATAACGGATAC
AACTTGGATAAAATTTATATCGTATCAAAATTTTATGAATCAGTATCCCAAAAGACTTACCGTGATTGGGAGACTATTAATACG
GCGTTAGAAATCCATTACAACAACATTCTGCCGGGTAACGGTAAATCGAAAGCGGACAAAGTGAAGAAGGCGGTTAAGAACGAT
CTTCAGAAGTCTATCACGGAGATTAATGAGCTGGTTTCCAATTACAAGTTGTGCTCGGATGATAACATCAAAGCTGAAACCTAT
ATCCATGAAATTTCTCATATTCTTAATAACTTCGAGGCACAAGAATTAAAATATAACCCAGAAATTCATCTGGTTGAGAGCGAA
CTTAAAGCTTCAGAATTAAAAAATGTTTTGGACGTAATTATGAACGCCTTCCATTGGTGCAGCGTGTTTATGACAGAGGAGTTA
GTAGATAAGGATAACAACTTTTATGCAGAATTGGAAGAGATCTATGATGAGATCTATCCAGTGATTTCACTGTATAACTTAGTC
CGTAATTACGTCACTTATAAGCCGTACTCAACTAAAAAGATCAAGTTAAATTTTGGAATTCCGACATTGGCGGATGGTTGGAGT
AAGTCTAAGGAATACTCAAATAACGCTATTATCTTAATGCGTGACAACCTGTATTACTTGGGTATTTTCAATGCCAAAAATAAG
CCCGATAAAAAAATCATTGAAGGGAATACTTCAGAAAATAAGGGAGATTACAAAAAAATGATTTATAACCTTTTGCCAGGCCCA
AACAAAATGATCCCCAAGGTGTTTTTGAGTAGTAAGACGGGAGTAGAAACATATAAGCCATCAGCGTACATTCTTGAAGGGTAC
AAACAAAATAAACACATCAAGAGCAGCAAGGACTTTGACATTACATTTTGTCATGACTTAATCGACTACTTTAAAAATTGCATT
GCCATTCACCCTGAGTGGAAAAATTTTGGTTTCGACTTCAGTGATACCTCTACCTATGAAGATATCTCTGGTTTTTATCGTGAG
GTAGAACTTCAGGGTTACAAGATCGATTGGACGTACATTTCCGAGAAAGACATTGATCTTTTACAAGAGAAGGGTCAGCTTTAC
TTATTTCAGATCTACAATAAAGACTTTTCGAAAAAATCCACGGGCAACGACAACCTTCATACAATGTACTTAAAGAACCTGTTC
TCTGAAGAAAACTTGAAAGATATCGTGCTTAAATTGAATGGCGAGGCCGAGATTTTTTTCCGTAAAAGCTCGATTAAGAATCCC
ATCATCCACAAGAAAGGCAGCATTCTGGTAAATCGTACCTATGAAGCGGAGGAAAAGGACCAATTTGGTAATATTCAGATTGTC
CGTAAGAACATCCCTGAAAATATCTATCAAGAATTATATAAATATTTCAACGATAAGTCGGACAAGGAACTTAGCGATGAAGCC
GCGAAGTTGAAAAATGTTGTTGGTCACCACGAAGCAGCAACAAACATTGTGAAAGACTATCGCTACACTTACGATAAGTACTTT
TTACATATGCCTATTACGATTAACTTTAAGGCAAATAAGACAGGTTTTATCAACGACCGTATCCTGCAATATATTGCAAAAGAG
AAGGACCTGCATGTCATTGGGATTGATCGCGGTGAACGCAATCTGATTTACGTGAGTGTTATTGATACCTGCGGTAATATTGTT
GAGCAAAAGTCTTTTAATATCGTTAATGGTTACGACTACCAAATTAAGCTTAAACAACAGGAAGGTGCCCGCCAGATCGCCCGT
AAGGAGTGGAAGGAAATCGGAAAAATTAAGGAAATCAAAGAGGGATATCTGAGCTTGGTTATTCATGAAATCTCAAAGATGGTT
ATTAAGTACAACGCCATCATCGCTATGGAAGACTTATCGTATGGGTTTAAAAAGGGTCGTTTCAAAGTTGAGCGCCAGGTCTAC
CAAAAGTTTGAAACGATGCTTATTAATAAATTAAACTACTTGGTTTTCAAAGATATCTCTATTACCGAGAATGGAGGTTTACTG
AAAGGATACCAGTTAACGTATATCCCCGATAAGCTTAAAAACGTGGGCCATCAGTGTGGCTGTATTTTCTATGTGCCCGCGGCA
TATACATCAAAAATTGACCCGACGACGGGTTTCGTTAATATCTTCAAGTTCAAAGATCTGACAGTTGATGCAAAACGCGAATTC
ATTAAGAAGTTCGATAGTATTCGCTATGACTCCGAGAAAAATTTGTTTTGCTTCACTTTTGACTACAATAACTTTATTACTCAG
AATACAGTCATGAGTAAAAGCTCCTGGTCGGTTTACACGTACGGGGTACGCATCAAACGTCGTTTTGTGAATGGTCGTTTTAGT
AATGAGTCGGATACAATTGATATTACCAAGGATATGGAGAAGACTCTGGAAATGACAGACATCAATTGGCGTGATGGACATGAT
TTGCGTCAGGACATTATCGACTATGAGATTGTGCAGCATATTTTCGAAATTTTTCGCCTGACGGTGCAAATGCGTAATTCCTTA
AGCGAACTGGAAGATCGCGACTATGACCGCTTAATTTCTCCTGTGCTGAATGAGAACAACATCTTCTATGACTCAGCGAAAGCC
GGGGACGCTTTGCCAAAGGATGCAGATGCTAACGGTGCATATTGTATTGCTCTGAAAGGCCTTTACGAGATCAAACAAATTACT
GAAAACTGGAAGGAAGATGGAAAGTTTTCCCGTGATAAATTGAAGATCTCTAATAAGGACTGGTTTGACTTTATCCAAAATAAA
CGTTATTTA
ErCas12a-Q510Y-AA (SEQ ID NO: 66)
MNNGTNNFQNFIGISSLQKTLRNALIPTETTQQFIVKNGIIKEDELRGENRQILKDIMDDYYRGFISETLSSIDDIDWTSLFEK
MEIQLKNGDNKDTLIKEQTEYRKAIHKKFANDDRFKNMFSAKLISDILPEFVIHNNNYSASEKEEKTQVIKLFSRFATSFKDYF
KNRANCFSADDISSSSCHRIVNDNAEIFFSNALVYRRIVKSLSNDDINKISGDMKDSLKEMSLEEIYSYEKYGEFITQEGISFY
NDICGKVNSFMNLYCQKNKENKNLYKLQKLHKQILCIADTSYEVPYKFESDEEVYQSVNGELDNISSKHIVERLRKIGDNYNGY
NLDKIYIVSKFYESVSQKTYRDWETINTALEIHYNNILPGNGKSKADKVKKAVKNDLKPYSTKKIKLNFGIPTLADGWSKSKEY
SNNAIILMRDNLYYLGIFNAKNKPDKKIIEGNTSENKGDYKKMIYNLLPGPNKMIPKVFLSSKTGVETYKPSAYILEGYKQNKH
IKSSKDFDITFCHDLIDYFKNCIAIHPEWKNFGFDFSDTSTYEDISGFYREVELQGYKIDWTYISEKDIDLLQEKGQLYLFQIY
NKDFSKKSTGNDNLHTMYLKNLFSEENLKDIVLKLNGEAEIFFRKSSIKNPIIHKKGSILVNRTYEAEEKDQFGNIQIVRKNIP
ENIYQELYKYFNDKSDKELSDEAAKLKNVVGHHEAATNIVKDYRYTYDKYFLHMPITINFKANKTGFINDRILQYIAKEKDLHV
IGIDRGERNLIYVSVIDTCGNIVEQKSFNIVNGYDYQIKLKQQEGARQIARKEWKEIGKIKEIKEGYLSLVIHEISKMVIKYNA
IIAMEDLSYGFKKGRFKVERQVYQKFETMLINKLNYLVFKDISITENGGLLKGYQLTYIPDKLKNVGHQCGCIFYVPAAYTSKI
DPTTGFVNIFKFKDLTVDAKREFIKKFDSIRYDSEKNLFCFTFDYNNFITQNTVMSKSSWSVYTYGVRIKRRFVNGRESNESDT
IDITKDMEKTLEMTDINWRDGHDLRQDIIDYEIVQHIFEIFRLTVQMRNSLSELEDRDYDRLISPVLNENNIFYDSAKAGDALP
KDADANGAYCIALKGLYEIKQITENWKEDGKFSRDKLKISNKDWFDFIQNKRYLQKSITEINELVSNYKLCSDDNIKAETYIHE
ISHILNNFEAQELKYNPEIHLVESELKASELKNVLDVIMNAFHWCSVFMTEELVDKDNNFYAELEEIYDEIYPVISLYNLVRNY
VTY
ErCas12a-Q510V-NT (SEQ ID NO: 67)
atgAATAACGGTACCAATAACTTTCAAAATTTTATCGGGATCTCCTCGTTGCAAAAAACTCTTCGTAATGCTTTAATCCCGACT
GAGACAACACAGCAGTTCATCGTTAAAAACGGCATCATTAAAGAAGATGAGCTGCGCGGCGAGAACCGTCAGATTTTAAAGGAC
ATCATGGACGACTATTACCGTGGGTTCATCTCAGAAACATTAAGCAGCATCGATGATATCGACTGGACCTCACTGTTTGAGAAG
ATGGAGATTCAACTTAAGAATGGAGACAACAAAGACACTTTAATTAAGGAGCAGACGGAATATCGTAAAGCTATCCATAAAAAA
TTTGCAAACGATGACCGTTTCAAAAATATGTTTTCCGCAAAATTGATTAGCGACATTTTACCTGAATTCGTAATCCATAACAAC
AACTATTCCGCATCTGAAAAAGAGGAGAAGACCCAAGTTATCAAACTTTTTTCACGTTTCGCGACATCTTTTAAAGACTACTTT
AAGAATCGTGCGAATTGTTTCAGTGCAGATGATATTTCGTCTAGTTCATGTCACCGTATCGTGAATGACAACGCTGAGATTTTC
TTTTCTAATGCGTTGGTGTATCGCCGCATCGTAAAGTCCTTGTCGAATGATGATATCAACAAAATTAGTGGTGACATGAAAGAC
TCCCTGAAAGAAATGTCATTAGAGGAGATTTACAGCTACGAAAAATACGGAGAGTTCATCACTCAGGAAGGTATCTCCTTTTAC
AACGATATTTGCGGCAAAGTTAATAGTTTCATGAATCTGTATTGTCAGAAGAATAAGGAAAACAAGAATCTGTACAAGTTACAA
AAGCTTCATAAACAGATCTTGTGCATCGCCGACACGTCTTATGAAGTCCCGTATAAATTTGAAAGCGACGAAGAAGTATATCAG
AGTGTGAATGGATTCTTGGACAATATCTCATCAAAACACATTGTTGAACGTTTGCGCAAAATCGGCGACAACTATAACGGATAC
AACTTGGATAAAATTTATATCGTATCAAAATTTTATGAATCAGTATCCCAAAAGACTTACCGTGATTGGGAGACTATTAATACG
GCGTTAGAAATCCATTACAACAACATTCTGCCGGGTAACGGTAAATCGAAAGCGGACAAAGTGAAGAAGGCGGTTAAGAACGAT
CTTCAGAAGTCTATCACGGAGATTAATGAGCTGGTTTCCAATTACAAGTTGTGCTCGGATGATAACATCAAAGCTGAAACCTAT
ATCCATGAAATTTCTCATATTCTTAATAACTTCGAGGCACAAGAATTAAAATATAACCCAGAAATTCATCTGGTTGAGAGCGAA
CTTAAAGCTTCAGAATTAAAAAATGTTTTGGACGTAATTATGAACGCCTTCCATTGGTGCAGCGTGTTTATGACAGAGGAGTTA
GTAGATAAGGATAACAACTTTTATGCAGAATTGGAAGAGATCTATGATGAGATCTATCCAGTGATTTCACTGTATAACTTAGTC
CGTAATTACGTCACTGTGAAGCCGTACTCAACTAAAAAGATCAAGTTAAATTTTGGAATTCCGACATTGGCGGATGGTTGGAGT
AAGTCTAAGGAATACTCAAATAACGCTATTATCTTAATGCGTGACAACCTGTATTACTTGGGTATTTTCAATGCCAAAAATAAG
CCCGATAAAAAAATCATTGAAGGGAATACTTCAGAAAATAAGGGAGATTACAAAAAAATGATTTATAACCTTTTGCCAGGCCCA
AACAAAATGATCCCCAAGGTGTTTTTGAGTAGTAAGACGGGAGTAGAAACATATAAGCCATCAGCGTACATTCTTGAAGGGTAC
AAACAAAATAAACACATCAAGAGCAGCAAGGACTTTGACATTACATTTTGTCATGACTTAATCGACTACTTTAAAAATTGCATT
GCCATTCACCCTGAGTGGAAAAATTTTGGTTTCGACTTCAGTGATACCTCTACCTATGAAGATATCTCTGGTTTTTATCGTGAG
GTAGAACTTCAGGGTTACAAGATCGATTGGACGTACATTTCCGAGAAAGACATTGATCTTTTACAAGAGAAGGGTCAGCTTTAC
TTATTTCAGATCTACAATAAAGACTTTTCGAAAAAATCCACGGGCAACGACAACCTTCATACAATGTACTTAAAGAACCTGTTC
TCTGAAGAAAACTTGAAAGATATCGTGCTTAAATTGAATGGCGAGGCCGAGATTTTTTTCCGTAAAAGCTCGATTAAGAATCCC
ATCATCCACAAGAAAGGCAGCATTCTGGTAAATCGTACCTATGAAGCGGAGGAAAAGGACCAATTTGGTAATATTCAGATTGTC
CGTAAGAACATCCCTGAAAATATCTATCAAGAATTATATAAATATTTCAACGATAAGTCGGACAAGGAACTTAGCGATGAAGCC
GCGAAGTTGAAAAATGTTGTTGGTCACCACGAAGCAGCAACAAACATTGTGAAAGACTATCGCTACACTTACGATAAGTACTTT
TTACATATGCCTATTACGATTAACTTTAAGGCAAATAAGACAGGTTTTATCAACGACCGTATCCTGCAATATATTGCAAAAGAG
AAGGACCTGCATGTCATTGGGATTGATCGCGGTGAACGCAATCTGATTTACGTGAGTGTTATTGATACCTGCGGTAATATTGTT
GAGCAAAAGTCTTTTAATATCGTTAATGGTTACGACTACCAAATTAAGCTTAAACAACAGGAAGGTGCCCGCCAGATCGCCCGT
AAGGAGTGGAAGGAAATCGGAAAAATTAAGGAAATCAAAGAGGGATATCTGAGCTTGGTTATTCATGAAATCTCAAAGATGGTT
ATTAAGTACAACGCCATCATCGCTATGGAAGACTTATCGTATGGGTTTAAAAAGGGTCGTTTCAAAGTTGAGCGCCAGGTCTAC
CAAAAGTTTGAAACGATGCTTATTAATAAATTAAACTACTTGGTTTTCAAAGATATCTCTATTACCGAGAATGGAGGTTTACTG
AAAGGATACCAGTTAACGTATATCCCCGATAAGCTTAAAAACGTGGGCCATCAGTGTGGCTGTATTTTCTATGTGCCCGCGGCA
TATACATCAAAAATTGACCCGACGACGGGTTTCGTTAATATCTTCAAGTTCAAAGATCTGACAGTTGATGCAAAACGCGAATTC
ATTAAGAAGTTCGATAGTATTCGCTATGACTCCGAGAAAAATTTGTTTTGCTTCACTTTTGACTACAATAACTTTATTACTCAG
AATACAGTCATGAGTAAAAGCTCCTGGTCGGTTTACACGTACGGGGTACGCATCAAACGTCGTTTTGTGAATGGTCGTTTTAGT
AATGAGTCGGATACAATTGATATTACCAAGGATATGGAGAAGACTCTGGAAATGACAGACATCAATTGGCGTGATGGACATGAT
TTGCGTCAGGACATTATCGACTATGAGATTGTGCAGCATATTTTCGAAATTTTTCGCCTGACGGTGCAAATGCGTAATTCCTTA
AGCGAACTGGAAGATCGCGACTATGACCGCTTAATTTCTCCTGTGCTGAATGAGAACAACATCTTCTATGACTCAGCGAAAGCC
GGGGACGCTTTGCCAAAGGATGCAGATGCTAACGGTGCATATTGTATTGCTCTGAAAGGCCTTTACGAGATCAAACAAATTACT
GAAAACTGGAAGGAAGATGGAAAGTTTTCCCGTGATAAATTGAAGATCTCTAATAAGGACTGGTTTGACTTTATCCAAAATAAA
CGTTATTTA
ErCas12a-Q510V-AA (SEQ ID NO: 68)
MNNGTNNFQNFIGISSLQKTLRNALIPTETTQQFIVKNGIIKEDELRGENRQILKDIMDDYYRGFISETLSSIDDIDWTSLFEK
MEIQLKNGDNKDTLIKEQTEYRKAIHKKFANDDRFKNMFSAKLISDILPEFVIHNNNYSASEKEEKTQVIKLFSRFATSFKDYF
KNRANCESADDISSSSCHRIVNDNAEIFFSNALVYRRIVKSLSNDDINKISGDMKDSLKEMSLEEIYSYEKYGEFITQEGISFY
NDICGKVNSFMNLYCQKNKENKNLYKLQKLHKQILCIADTSYEVPYKFESDEEVYQSVNGELDNISSKHIVERLRKIGDNYNGY
NLDKIYIVSKFYESVSQKTYRDWETINTALEIHYNNILPGNGKSKADKVKKAVKNDLQKSITEINELVSNYKLCSDDNIKAETY
IHEISHILNNFEAQELKYNPEIHLVESELKASELKNVLDVIMNAFHWCSVFMTEELVDKDNNFYAELEEIYDEIYPVISLYNLV
RNYVTVKPYSTKKIKLNFGIPTLADGWSKSKEYSNNAIILMRDNLYYLGIFNAKNKPDKKIIEGNTSENKGDYKKMIYNLLPGP
NKMIPKVFLSSKTGVETYKPSAYILEGYKQNKHIKSSKDFDITFCHDLIDYFKNCIAIHPEWKNFGFDFSDTSTYEDISGFYRE
VELQGYKIDWTYISEKDIDLLQEKGQLYLFQIYNKDFSKKSTGNDNLHTMYLKNLFSEENLKDIVLKLNGEAEIFFRKSSIKNP
IIHKKGSILVNRTYEAEEKDQFGNIQIVRKNIPENIYQELYKYFNDKSDKELSDEAAKLKNVVGHHEAATNIVKDYRYTYDKYF
LHMPITINFKANKTGFINDRILQYIAKEKDLHVIGIDRGERNLIYVSVIDTCGNIVEQKSFNIVNGYDYQIKLKQQEGARQIAR
KEWKEIGKIKEIKEGYLSLVIHEISKMVIKYNAIIAMEDLSYGFKKGRFKVERQVYQKFETMLINKLNYLVFKDISITENGGLL
KGYQLTYIPDKLKNVGHQCGCIFYVPAAYTSKIDPTTGFVNIFKFKDLTVDAKREFIKKFDSIRYDSEKNLFCFTEDYNNFITQ
NTVMSKSSWSVYTYGVRIKRRFVNGRFSNESDTIDITKDMEKTLEMTDINWRDGHDLRQDIIDYEIVQHIFEIFRLTVQMRNSL
SELEDRDYDRLISPVLNENNIFYDSAKAGDALPKDADANGAYCIALKGLYEIKQITENWKEDGKFSRDKLKISNKDWFDFIQNK
RYL
ErCas12a-Q510K-NT (SEQ ID NO: 69)
atgAATAACGGTACCAATAACTTTCAAAATTTTATCGGGATCTCCTCGTTGCAAAAAACTCTTCGTAATGCTTTAATCCCGACT
GAGACAACACAGCAGTTCATCGTTAAAAACGGCATCATTAAAGAAGATGAGCTGCGCGGCGAGAACCGTCAGATTTTAAAGGAC
ATCATGGACGACTATTACCGTGGGTTCATCTCAGAAACATTAAGCAGCATCGATGATATCGACTGGACCTCACTGTTTGAGAAG
ATGGAGATTCAACTTAAGAATGGAGACAACAAAGACACTTTAATTAAGGAGCAGACGGAATATCGTAAAGCTATCCATAAAAAA
TTTGCAAACGATGACCGTTTCAAAAATATGTTTTCCGCAAAATTGATTAGCGACATTTTACCTGAATTCGTAATCCATAACAAC
AACTATTCCGCATCTGAAAAAGAGGAGAAGACCCAAGTTATCAAACTTTTTTCACGTTTCGCGACATCTTTTAAAGACTACTTT
AAGAATCGTGCGAATTGTTTCAGTGCAGATGATATTTCGTCTAGTTCATGTCACCGTATCGTGAATGACAACGCTGAGATTTTC
TTTTCTAATGCGTTGGTGTATCGCCGCATCGTAAAGTCCTTGTCGAATGATGATATCAACAAAATTAGTGGTGACATGAAAGAC
TCCCTGAAAGAAATGTCATTAGAGGAGATTTACAGCTACGAAAAATACGGAGAGTTCATCACTCAGGAAGGTATCTCCTTTTAC
AACGATATTTGCGGCAAAGTTAATAGTTTCATGAATCTGTATTGTCAGAAGAATAAGGAAAACAAGAATCTGTACAAGTTACAA
AAGCTTCATAAACAGATCTTGTGCATCGCCGACACGTCTTATGAAGTCCCGTATAAATTTGAAAGCGACGAAGAAGTATATCAG
AGTGTGAATGGATTCTTGGACAATATCTCATCAAAACACATTGTTGAACGTTTGCGCAAAATCGGCGACAACTATAACGGATAC
AACTTGGATAAAATTTATATCGTATCAAAATTTTATGAATCAGTATCCCAAAAGACTTACCGTGATTGGGAGACTATTAATACG
GCGTTAGAAATCCATTACAACAACATTCTGCCGGGTAACGGTAAATCGAAAGCGGACAAAGTGAAGAAGGCGGTTAAGAACGAT
CTTCAGAAGTCTATCACGGAGATTAATGAGCTGGTTTCCAATTACAAGTTGTGCTCGGATGATAACATCAAAGCTGAAACCTAT
ATCCATGAAATTTCTCATATTCTTAATAACTTCGAGGCACAAGAATTAAAATATAACCCAGAAATTCATCTGGTTGAGAGCGAA
CTTAAAGCTTCAGAATTAAAAAATGTTTTGGACGTAATTATGAACGCCTTCCATTGGTGCAGCGTGTTTATGACAGAGGAGTTA
GTAGATAAGGATAACAACTTTTATGCAGAATTGGAAGAGATCTATGATGAGATCTATCCAGTGATTTCACTGTATAACTTAGTC
CGTAATTACGTCACTAAAAAGCCGTACTCAACTAAAAAGATCAAGTTAAATTTTGGAATTCCGACATTGGCGGATGGTTGGAGT
AAGTCTAAGGAATACTCAAATAACGCTATTATCTTAATGCGTGACAACCTGTATTACTTGGGTATTTTCAATGCCAAAAATAAG
CCCGATAAAAAAATCATTGAAGGGAATACTTCAGAAAATAAGGGAGATTACAAAAAAATGATTTATAACCTTTTGCCAGGCCCA
AACAAAATGATCCCCAAGGTGTTTTTGAGTAGTAAGACGGGAGTAGAAACATATAAGCCATCAGCGTACATTCTTGAAGGGTAC
AAACAAAATAAACACATCAAGAGCAGCAAGGACTTTGACATTACATTTTGTCATGACTTAATCGACTACTTTAAAAATTGCATT
GCCATTCACCCTGAGTGGAAAAATTTTGGTTTCGACTTCAGTGATACCTCTACCTATGAAGATATCTCTGGTTTTTATCGTGAG
GTAGAACTTCAGGGTTACAAGATCGATTGGACGTACATTTCCGAGAAAGACATTGATCTTTTACAAGAGAAGGGTCAGCTTTAC
TTATTTCAGATCTACAATAAAGACTTTTCGAAAAAATCCACGGGCAACGACAACCTTCATACAATGTACTTAAAGAACCTGTTC
TCTGAAGAAAACTTGAAAGATATCGTGCTTAAATTGAATGGCGAGGCCGAGATTTTTTTCCGTAAAAGCTCGATTAAGAATCCC
ATCATCCACAAGAAAGGCAGCATTCTGGTAAATCGTACCTATGAAGCGGAGGAAAAGGACCAATTTGGTAATATTCAGATTGTC
CGTAAGAACATCCCTGAAAATATCTATCAAGAATTATATAAATATTTCAACGATAAGTCGGACAAGGAACTTAGCGATGAAGCC
GCGAAGTTGAAAAATGTTGTTGGTCACCACGAAGCAGCAACAAACATTGTGAAAGACTATCGCTACACTTACGATAAGTACTTT
TTACATATGCCTATTACGATTAACTTTAAGGCAAATAAGACAGGTTTTATCAACGACCGTATCCTGCAATATATTGCAAAAGAG
AAGGACCTGCATGTCATTGGGATTGATCGCGGTGAACGCAATCTGATTTACGTGAGTGTTATTGATACCTGCGGTAATATTGTT
GAGCAAAAGTCTTTTAATATCGTTAATGGTTACGACTACCAAATTAAGCTTAAACAACAGGAAGGTGCCCGCCAGATCGCCCGT
AAGGAGTGGAAGGAAATCGGAAAAATTAAGGAAATCAAAGAGGGATATCTGAGCTTGGTTATTCATGAAATCTCAAAGATGGTT
ATTAAGTACAACGCCATCATCGCTATGGAAGACTTATCGTATGGGTTTAAAAAGGGTCGTTTCAAAGTTGAGCGCCAGGTCTAC
CAAAAGTTTGAAACGATGCTTATTAATAAATTAAACTACTTGGTTTTCAAAGATATCTCTATTACCGAGAATGGAGGTTTACTG
AAAGGATACCAGTTAACGTATATCCCCGATAAGCTTAAAAACGTGGGCCATCAGTGTGGCTGTATTTTCTATGTGCCCGCGGCA
TATACATCAAAAATTGACCCGACGACGGGTTTCGTTAATATCTTCAAGTTCAAAGATCTGACAGTTGATGCAAAACGCGAATTC
ATTAAGAAGTTCGATAGTATTCGCTATGACTCCGAGAAAAATTTGTTTTGCTTCACTTTTGACTACAATAACTTTATTACTCAG
AATACAGTCATGAGTAAAAGCTCCTGGTCGGTTTACACGTACGGGGTACGCATCAAACGTCGTTTTGTGAATGGTCGTTTTAGT
AATGAGTCGGATACAATTGATATTACCAAGGATATGGAGAAGACTCTGGAAATGACAGACATCAATTGGCGTGATGGACATGAT
TTGCGTCAGGACATTATCGACTATGAGATTGTGCAGCATATTTTCGAAATTTTTCGCCTGACGGTGCAAATGCGTAATTCCTTA
AGCGAACTGGAAGATCGCGACTATGACCGCTTAATTTCTCCTGTGCTGAATGAGAACAACATCTTCTATGACTCAGCGAAAGCC
GGGGACGCTTTGCCAAAGGATGCAGATGCTAACGGTGCATATTGTATTGCTCTGAAAGGCCTTTACGAGATCAAACAAATTACT
GAAAACTGGAAGGAAGATGGAAAGTTTTCCCGTGATAAATTGAAGATCTCTAATAAGGACTGGTTTGACTTTATCCAAAATAAA
CGTTATTTA
ErCas12a-Q510K-AA (SEQ ID NO: 70)
MNNGTNNFQNFIGISSLQKTLRNALIPTETTQQFIVKNGIIKEDELRGENRQILKDIMDDYYRGFISETLSSIDDIDWTSLFEK
MEIQLKNGDNKDTLIKEQTEYRKAIHKKFANDDRFKNMFSAKLISDILPEFVIHNNNYSASEKEEKTQVIKLFSRFATSFKDYF
KNRANCFSADDISSSSCHRIVNDNAEIFFSNALVYRRIVKSLSNDDINKISGDMKDSLKEMSLEEIYSYEKYGEFITQEGISFY
NDICGKVNSFMNLYCQKNKENKNLYKLQKLHKQILCIADTSYEVPYKFESDEEVYQSVNGELDNISSKHIVERLRKIGDNYNGY
NLDKIYIVSKFYESVSQKTYRDWETINTALEIHYNNILPGNGKSKADKVKKAVKNDLQKSITEINELVSNYKLCSDDNIKAETY
IHEISHILNNFEAQELKYNPEIHLVESELKASELKNVLDVIMNAFHWCSVFMTEELVDKDNNFYAELEEIYDEIYPVISLYNLV
RNYVTKKPYSTKKIKLNFGIPTLADGWSKSKEYSNNAIILMRDNLYYLGIFNAKNKPDKKIIEGNTSENKGDYKKMIYNLLPGP
NKMIPKVFLSSKTGVETYKPSAYILEGYKQNKHIKSSKDFDITFCHDLIDYFKNCIAIHPEWKNFGFDFSDTSTYEDISGFYRE
VELQGYKIDWTYISEKDIDLLQEKGQLYLFQIYNKDFSKKSTGNDNLHTMYLKNLFSEENLKDIVLKLNGEAEIFFRKSSIKNP
IIHKKGSILVNRTYEAEEKDQFGNIQIVRKNIPENIYQELYKYFNDKSDKELSDEAAKLKNVVGHHEAATNIVKDYRYTYDKYF
LHMPITINFKANKTGFINDRILQYIAKEKDLHVIGIDRGERNLIYVSVIDTCGNIVEQKSFNIVNGYDYQIKLKQQEGARQIAR
KEWKEIGKIKEIKEGYLSLVIHEISKMVIKYNAIIAMEDLSYGFKKGRFKVERQVYQKFETMLINKLNYLVFKDISITENGGLL
KGYQLTYIPDKLKNVGHQCGCIFYVPAAYTSKIDPTTGFVNIFKFKDLTVDAKREFIKKFDSIRYDSEKNLFCFTEDYNNFITQ
NTVMSKSSWSVYTYGVRIKRRFVNGRFSNESDTIDITKDMEKTLEMTDINWRDGHDLRQDIIDYEIVQHIFEIFRLTVQMRNSL
SELEDRDYDRLISPVLNENNIFYDSAKAGDALPKDADANGAYCIALKGLYEIKQITENWKEDGKFSRDKLKISNKDWEDFIQNK
RYL
ErCas12a-P512V-NT (SEQ ID NO: 71)
atgAATAACGGTACCAATAACTTTCAAAATTTTATCGGGATCTCCTCGTTGCAAAAAACTCTTCGTAATGCTTTAATCCCGACT
GAGACAACACAGCAGTTCATCGTTAAAAACGGCATCATTAAAGAAGATGAGCTGCGCGGCGAGAACCGTCAGATTTTAAAGGAC
ATCATGGACGACTATTACCGTGGGTTCATCTCAGAAACATTAAGCAGCATCGATGATATCGACTGGACCTCACTGTTTGAGAAG
ATGGAGATTCAACTTAAGAATGGAGACAACAAAGACACTTTAATTAAGGAGCAGACGGAATATCGTAAAGCTATCCATAAAAAA
TTTGCAAACGATGACCGTTTCAAAAATATGTTTTCCGCAAAATTGATTAGCGACATTTTACCTGAATTCGTAATCCATAACAAC
AACTATTCCGCATCTGAAAAAGAGGAGAAGACCCAAGTTATCAAACTTTTTTCACGTTTCGCGACATCTTTTAAAGACTACTTT
AAGAATCGTGCGAATTGTTTCAGTGCAGATGATATTTCGTCTAGTTCATGTCACCGTATCGTGAATGACAACGCTGAGATTTTC
TTTTCTAATGCGTTGGTGTATCGCCGCATCGTAAAGTCCTTGTCGAATGATGATATCAACAAAATTAGTGGTGACATGAAAGAC
TCCCTGAAAGAAATGTCATTAGAGGAGATTTACAGCTACGAAAAATACGGAGAGTTCATCACTCAGGAAGGTATCTCCTTTTAC
AACGATATTTGCGGCAAAGTTAATAGTTTCATGAATCTGTATTGTCAGAAGAATAAGGAAAACAAGAATCTGTACAAGTTACAA
AAGCTTCATAAACAGATCTTGTGCATCGCCGACACGTCTTATGAAGTCCCGTATAAATTTGAAAGCGACGAAGAAGTATATCAG
AGTGTGAATGGATTCTTGGACAATATCTCATCAAAACACATTGTTGAACGTTTGCGCAAAATCGGCGACAACTATAACGGATAC
AACTTGGATAAAATTTATATCGTATCAAAATTTTATGAATCAGTATCCCAAAAGACTTACCGTGATTGGGAGACTATTAATACG
GCGTTAGAAATCCATTACAACAACATTCTGCCGGGTAACGGTAAATCGAAAGCGGACAAAGTGAAGAAGGCGGTTAAGAACGAT
CTTCAGAAGTCTATCACGGAGATTAATGAGCTGGTTTCCAATTACAAGTTGTGCTCGGATGATAACATCAAAGCTGAAACCTAT
ATCCATGAAATTTCTCATATTCTTAATAACTTCGAGGCACAAGAATTAAAATATAACCCAGAAATTCATCTGGTTGAGAGCGAA
CTTAAAGCTTCAGAATTAAAAAATGTTTTGGACGTAATTATGAACGCCTTCCATTGGTGCAGCGTGTTTATGACAGAGGAGTTA
GTAGATAAGGATAACAACTTTTATGCAGAATTGGAAGAGATCTATGATGAGATCTATCCAGTGATTTCACTGTATAACTTAGTC
CGTAATTACGTCACTCAGAAGGTGTACTCAACTAAAAAGATCAAGTTAAATTTTGGAATTCCGACATTGGCGGATGGTTGGAGT
AAGTCTAAGGAATACTCAAATAACGCTATTATCTTAATGCGTGACAACCTGTATTACTTGGGTATTTTCAATGCCAAAAATAAG
CCCGATAAAAAAATCATTGAAGGGAATACTTCAGAAAATAAGGGAGATTACAAAAAAATGATTTATAACCTTTTGCCAGGCCCA
AACAAAATGATCCCCAAGGTGTTTTTGAGTAGTAAGACGGGAGTAGAAACATATAAGCCATCAGCGTACATTCTTGAAGGGTAC
AAACAAAATAAACACATCAAGAGCAGCAAGGACTTTGACATTACATTTTGTCATGACTTAATCGACTACTTTAAAAATTGCATT
GCCATTCACCCTGAGTGGAAAAATTTTGGTTTCGACTTCAGTGATACCTCTACCTATGAAGATATCTCTGGTTTTTATCGTGAG
GTAGAACTTCAGGGTTACAAGATCGATTGGACGTACATTTCCGAGAAAGACATTGATCTTTTACAAGAGAAGGGTCAGCTTTAC
TTATTTCAGATCTACAATAAAGACTTTTCGAAAAAATCCACGGGCAACGACAACCTTCATACAATGTACTTAAAGAACCTGTTC
TCTGAAGAAAACTTGAAAGATATCGTGCTTAAATTGAATGGCGAGGCCGAGATTTTTTTCCGTAAAAGCTCGATTAAGAATCCC
ATCATCCACAAGAAAGGCAGCATTCTGGTAAATCGTACCTATGAAGCGGAGGAAAAGGACCAATTTGGTAATATTCAGATTGTC
CGTAAGAACATCCCTGAAAATATCTATCAAGAATTATATAAATATTTCAACGATAAGTCGGACAAGGAACTTAGCGATGAAGCC
GCGAAGTTGAAAAATGTTGTTGGTCACCACGAAGCAGCAACAAACATTGTGAAAGACTATCGCTACACTTACGATAAGTACTTT
TTACATATGCCTATTACGATTAACTTTAAGGCAAATAAGACAGGTTTTATCAACGACCGTATCCTGCAATATATTGCAAAAGAG
AAGGACCTGCATGTCATTGGGATTGATCGCGGTGAACGCAATCTGATTTACGTGAGTGTTATTGATACCTGCGGTAATATTGTT
GAGCAAAAGTCTTTTAATATCGTTAATGGTTACGACTACCAAATTAAGCTTAAACAACAGGAAGGTGCCCGCCAGATCGCCCGT
AAGGAGTGGAAGGAAATCGGAAAAATTAAGGAAATCAAAGAGGGATATCTGAGCTTGGTTATTCATGAAATCTCAAAGATGGTT
ATTAAGTACAACGCCATCATCGCTATGGAAGACTTATCGTATGGGTTTAAAAAGGGTCGTTTCAAAGTTGAGCGCCAGGTCTAC
CAAAAGTTTGAAACGATGCTTATTAATAAATTAAACTACTTGGTTTTCAAAGATATCTCTATTACCGAGAATGGAGGTTTACTG
AAAGGATACCAGTTAACGTATATCCCCGATAAGCTTAAAAACGTGGGCCATCAGTGTGGCTGTATTTTCTATGTGCCCGCGGCA
TATACATCAAAAATTGACCCGACGACGGGTTTCGTTAATATCTTCAAGTTCAAAGATCTGACAGTTGATGCAAAACGCGAATTC
ATTAAGAAGTTCGATAGTATTCGCTATGACTCCGAGAAAAATTTGTTTTGCTTCACTTTTGACTACAATAACTTTATTACTCAG
AATACAGTCATGAGTAAAAGCTCCTGGTCGGTTTACACGTACGGGGTACGCATCAAACGTCGTTTTGTGAATGGTCGTTTTAGT
AATGAGTCGGATACAATTGATATTACCAAGGATATGGAGAAGACTCTGGAAATGACAGACATCAATTGGCGTGATGGACATGAT
TTGCGTCAGGACATTATCGACTATGAGATTGTGCAGCATATTTTCGAAATTTTTCGCCTGACGGTGCAAATGCGTAATTCCTTA
AGCGAACTGGAAGATCGCGACTATGACCGCTTAATTTCTCCTGTGCTGAATGAGAACAACATCTTCTATGACTCAGCGAAAGCC
GGGGACGCTTTGCCAAAGGATGCAGATGCTAACGGTGCATATTGTATTGCTCTGAAAGGCCTTTACGAGATCAAACAAATTACT
GAAAACTGGAAGGAAGATGGAAAGTTTTCCCGTGATAAATTGAAGATCTCTAATAAGGACTGGTTTGACTTTATCCAAAATAAA
CGTTATTTA
ErCas12a-P512V-AA (SEQ ID NO: 72)
MNNGTNNFQNFIGISSLQKTLRNALIPTETTQQFIVKNGIIKEDELRGENRQILKDIMDDYYRGFISETLSSIDDIDWTSLFEK
MEIQLKNGDNKDTLIKEQTEYRKAIHKKFANDDRFKNMFSAKLISDILPEFVIHNNNYSASEKEEKTQVIKLFSRFATSFKDYF
KNRANCESADDISSSSCHRIVNDNAEIFFSNALVYRRIVKSLSNDDINKISGDMKDSLKEMSLEEIYSYEKYGEFITQEGISFY
NDICGKVNSFMNLYCQKNKENKNLYKLQKLHKQILCIADTSYEVPYKFESDEEVYQSVNGELDNISSKHIVERLRKIGDNYNGY
NLDKIYIVSKFYESVSQKTYRDWETINTALEIHYNNILPGNGKSKADKVKKAVKNDLQKSITEINELVSNYKLCSDDNIKAETY
IHEISHILNNFEAQELKYNPEIHLVESELKASELKNVLDVIMNAFHWCSVFMTEELVDKDNNFYAELEEIYDEIYPVISLYNLV
RNYVTQKVYSTKKIKLNFGIPTLADGWSKSKEYSNNAIILMRDNLYYLGIFNAKNKPDKKIIEGNTSENKGDYKKMIYNLLPGP
NKMIPKVFLSSKTGVETYKPSAYILEGYKQNKHIKSSKDFDITFCHDLIDYFKNCIAIHPEWKNFGFDFSDTSTYEDISGFYRE
VELQGYKIDWTYISEKDIDLLQEKGQLYLFQIYNKDFSKKSTGNDNLHTMYLKNLFSEENLKDIVLKLNGEAEIFFRKSSIKNP
IIHKKGSILVNRTYEAEEKDQFGNIQIVRKNIPENIYQELYKYFNDKSDKELSDEAAKLKNVVGHHEAATNIVKDYRYTYDKYF
LHMPITINFKANKTGFINDRILQYIAKEKDLHVIGIDRGERNLIYVSVIDTCGNIVEQKSFNIVNGYDYQIKLKQQEGARQIAR
KEWKEIGKIKEIKEGYLSLVIHEISKMVIKYNAIIAMEDLSYGFKKGRFKVERQVYQKFETMLINKLNYLVFKDISITENGGLL
KGYQLTYIPDKLKNVGHQCGCIFYVPAAYTSKIDPTTGFVNIFKFKDLTVDAKREFIKKFDSIRYDSEKNLFCFTEDYNNFITQ
NTVMSKSSWSVYTYGVRIKRRFVNGRFSNESDTIDITKDMEKTLEMTDINWRDGHDLRQDIIDYEIVQHIFEIFRLTVQMRNSL
SELEDRDYDRLISPVLNENNIFYDSAKAGDALPKDADANGAYCIALKGLYEIKQITENWKEDGKFSRDKLKISNKDWFDFIQNK
RYL
ErCas12a-P512G-NT (SEQ ID NO: 73)
atgAATAACGGTACCAATAACTTTCAAAATTTTATCGGGATCTCCTCGTTGCAAAAAACTCTTCGTAATGCTTTAATCCCGACT
GAGACAACACAGCAGTTCATCGTTAAAAACGGCATCATTAAAGAAGATGAGCTGCGCGGCGAGAACCGTCAGATTTTAAAGGAC
ATCATGGACGACTATTACCGTGGGTTCATCTCAGAAACATTAAGCAGCATCGATGATATCGACTGGACCTCACTGTTTGAGAAG
ATGGAGATTCAACTTAAGAATGGAGACAACAAAGACACTTTAATTAAGGAGCAGACGGAATATCGTAAAGCTATCCATAAAAAA
TTTGCAAACGATGACCGTTTCAAAAATATGTTTTCCGCAAAATTGATTAGCGACATTTTACCTGAATTCGTAATCCATAACAAC
AACTATTCCGCATCTGAAAAAGAGGAGAAGACCCAAGTTATCAAACTTTTTTCACGTTTCGCGACATCTTTTAAAGACTACTTT
AAGAATCGTGCGAATTGTTTCAGTGCAGATGATATTTCGTCTAGTTCATGTCACCGTATCGTGAATGACAACGCTGAGATTTTC
TTTTCTAATGCGTTGGTGTATCGCCGCATCGTAAAGTCCTTGTCGAATGATGATATCAACAAAATTAGTGGTGACATGAAAGAC
TCCCTGAAAGAAATGTCATTAGAGGAGATTTACAGCTACGAAAAATACGGAGAGTTCATCACTCAGGAAGGTATCTCCTTTTAC
AACGATATTTGCGGCAAAGTTAATAGTTTCATGAATCTGTATTGTCAGAAGAATAAGGAAAACAAGAATCTGTACAAGTTACAA
AAGCTTCATAAACAGATCTTGTGCATCGCCGACACGTCTTATGAAGTCCCGTATAAATTTGAAAGCGACGAAGAAGTATATCAG
AGTGTGAATGGATTCTTGGACAATATCTCATCAAAACACATTGTTGAACGTTTGCGCAAAATCGGCGACAACTATAACGGATAC
AACTTGGATAAAATTTATATCGTATCAAAATTTTATGAATCAGTATCCCAAAAGACTTACCGTGATTGGGAGACTATTAATACG
GCGTTAGAAATCCATTACAACAACATTCTGCCGGGTAACGGTAAATCGAAAGCGGACAAAGTGAAGAAGGCGGTTAAGAACGAT
CTTCAGAAGTCTATCACGGAGATTAATGAGCTGGTTTCCAATTACAAGTTGTGCTCGGATGATAACATCAAAGCTGAAACCTAT
ATCCATGAAATTTCTCATATTCTTAATAACTTCGAGGCACAAGAATTAAAATATAACCCAGAAATTCATCTGGTTGAGAGCGAA
CTTAAAGCTTCAGAATTAAAAAATGTTTTGGACGTAATTATGAACGCCTTCCATTGGTGCAGCGTGTTTATGACAGAGGAGTTA
GTAGATAAGGATAACAACTTTTATGCAGAATTGGAAGAGATCTATGATGAGATCTATCCAGTGATTTCACTGTATAACTTAGTC
CGTAATTACGTCACTCAGAAGGGCTACTCAACTAAAAAGATCAAGTTAAATTTTGGAATTCCGACATTGGCGGATGGTTGGAGT
AAGTCTAAGGAATACTCAAATAACGCTATTATCTTAATGCGTGACAACCTGTATTACTTGGGTATTTTCAATGCCAAAAATAAG
CCCGATAAAAAAATCATTGAAGGGAATACTTCAGAAAATAAGGGAGATTACAAAAAAATGATTTATAACCTTTTGCCAGGCCCA
AACAAAATGATCCCCAAGGTGTTTTTGAGTAGTAAGACGGGAGTAGAAACATATAAGCCATCAGCGTACATTCTTGAAGGGTAC
AAACAAAATAAACACATCAAGAGCAGCAAGGACTTTGACATTACATTTTGTCATGACTTAATCGACTACTTTAAAAATTGCATT
GCCATTCACCCTGAGTGGAAAAATTTTGGTTTCGACTTCAGTGATACCTCTACCTATGAAGATATCTCTGGTTTTTATCGTGAG
GTAGAACTTCAGGGTTACAAGATCGATTGGACGTACATTTCCGAGAAAGACATTGATCTTTTACAAGAGAAGGGTCAGCTTTAC
TTATTTCAGATCTACAATAAAGACTTTTCGAAAAAATCCACGGGCAACGACAACCTTCATACAATGTACTTAAAGAACCTGTTC
TCTGAAGAAAACTTGAAAGATATCGTGCTTAAATTGAATGGCGAGGCCGAGATTTTTTTCCGTAAAAGCTCGATTAAGAATCCC
ATCATCCACAAGAAAGGCAGCATTCTGGTAAATCGTACCTATGAAGCGGAGGAAAAGGACCAATTTGGTAATATTCAGATTGTC
CGTAAGAACATCCCTGAAAATATCTATCAAGAATTATATAAATATTTCAACGATAAGTCGGACAAGGAACTTAGCGATGAAGCC
GCGAAGTTGAAAAATGTTGTTGGTCACCACGAAGCAGCAACAAACATTGTGAAAGACTATCGCTACACTTACGATAAGTACTTT
TTACATATGCCTATTACGATTAACTTTAAGGCAAATAAGACAGGTTTTATCAACGACCGTATCCTGCAATATATTGCAAAAGAG
AAGGACCTGCATGTCATTGGGATTGATCGCGGTGAACGCAATCTGATTTACGTGAGTGTTATTGATACCTGCGGTAATATTGTT
GAGCAAAAGTCTTTTAATATCGTTAATGGTTACGACTACCAAATTAAGCTTAAACAACAGGAAGGTGCCCGCCAGATCGCCCGT
AAGGAGTGGAAGGAAATCGGAAAAATTAAGGAAATCAAAGAGGGATATCTGAGCTTGGTTATTCATGAAATCTCAAAGATGGTT
ATTAAGTACAACGCCATCATCGCTATGGAAGACTTATCGTATGGGTTTAAAAAGGGTCGTTTCAAAGTTGAGCGCCAGGTCTAC
CAAAAGTTTGAAACGATGCTTATTAATAAATTAAACTACTTGGTTTTCAAAGATATCTCTATTACCGAGAATGGAGGTTTACTG
AAAGGATACCAGTTAACGTATATCCCCGATAAGCTTAAAAACGTGGGCCATCAGTGTGGCTGTATTTTCTATGTGCCCGCGGCA
TATACATCAAAAATTGACCCGACGACGGGTTTCGTTAATATCTTCAAGTTCAAAGATCTGACAGTTGATGCAAAACGCGAATTC
ATTAAGAAGTTCGATAGTATTCGCTATGACTCCGAGAAAAATTTGTTTTGCTTCACTTTTGACTACAATAACTTTATTACTCAG
AATACAGTCATGAGTAAAAGCTCCTGGTCGGTTTACACGTACGGGGTACGCATCAAACGTCGTTTTGTGAATGGTCGTTTTAGT
AATGAGTCGGATACAATTGATATTACCAAGGATATGGAGAAGACTCTGGAAATGACAGACATCAATTGGCGTGATGGACATGAT
TTGCGTCAGGACATTATCGACTATGAGATTGTGCAGCATATTTTCGAAATTTTTCGCCTGACGGTGCAAATGCGTAATTCCTTA
AGCGAACTGGAAGATCGCGACTATGACCGCTTAATTTCTCCTGTGCTGAATGAGAACAACATCTTCTATGACTCAGCGAAAGCC
GGGGACGCTTTGCCAAAGGATGCAGATGCTAACGGTGCATATTGTATTGCTCTGAAAGGCCTTTACGAGATCAAACAAATTACT
GAAAACTGGAAGGAAGATGGAAAGTTTTCCCGTGATAAATTGAAGATCTCTAATAAGGACTGGTTTGACTTTATCCAAAATAAA
CGTTATTTA
ErCas12a-P512G-AA (SEQ ID NO: 74)
MNNGTNNFQNFIGISSLQKTLRNALIPTETTQQFIVKNGIIKEDELRGENRQILKDIMDDYYRGFISETLSSIDDIDWTSLFEK
MEIQLKNGDNKDTLIKEQTEYRKAIHKKFANDDRFKNMFSAKLISDILPEFVIHNNNYSASEKEEKTQVIKLFSRFATSFKDYF
KNRANCFSADDISSSSCHRIVNDNAEIFFSNALVYRRIVKSLSNDDINKISGDMKDSLKEMSLEEIYSYEKYGEFITQEGISFY
NDICGKVNSFMNLYCQKNKENKNLYKLQKLHKQILCIADTSYEVPYKFESDEEVYQSVNGELDNISSKHIVERLRKIGDNYNGY
NLDKIYIVSKFYESVSQKTYRDWETINTALEIHYNNILPGNGKSKADKVKKAVKNDLQKSITEINELVSNYKLCSDDNIKAETY
IHEISHILNNFEAQELKYNPEIHLVESELKASELKNVLDVIMNAFHWCSVFMTEELVDKDNNFYAELEEIYDEIYPVISLYNLV
RNYVTQKGYSTKKIKLNFGIPTLADGWSKSKEYSNNAIILMRDNLYYLGIFNAKNKPDKKIIEGNTSENKGDYKKMIYNLLPGP
NKMIPKVFLSSKTGVETYKPSAYILEGYKQNKHIKSSKDFDITFCHDLIDYFKNCIAIHPEWKNFGFDFSDTSTYEDISGFYRE
VELQGYKIDWTYISEKDIDLLQEKGQLYLFQIYNKDFSKKSTGNDNLHTMYLKNLFSEENLKDIVLKLNGEAEIFFRKSSIKNP
IIHKKGSILVNRTYEAEEKDQFGNIQIVRKNIPENIYQELYKYFNDKSDKELSDEAAKLKNVVGHHEAATNIVKDYRYTYDKYF
LHMPITINFKANKTGFINDRILQYIAKEKDLHVIGIDRGERNLIYVSVIDTCGNIVEQKSFNIVNGYDYQIKLKQQEGARQIAR
KEWKEIGKIKEIKEGYLSLVIHEISKMVIKYNAIIAMEDLSYGFKKGRFKVERQVYQKFETMLINKLNYLVFKDISITENGGLL
KGYQLTYIPDKLKNVGHQCGCIFYVPAAYTSKIDPTTGFVNIFKFKDLTVDAKREFIKKFDSIRYDSEKNLFCFTFDYNNFITQ
NTVMSKSSWSVYTYGVRIKRRFVNGRFSNESDTIDITKDMEKTLEMTDINWRDGHDLRQDIIDYEIVQHIFEIFRLTVQMRNSL
SELEDRDYDRLISPVLNENNIFYDSAKAGDALPKDADANGAYCIALKGLYEIKQITENWKEDGKFSRDKLKISNKDWFDFIQNK
RYL
ErCas12a-Y513S-NT (SEQ ID NO: 75)
atgAATAACGGTACCAATAACTTTCAAAATTTTATCGGGATCTCCTCGTTGCAAAAAACTCTTCGTAATGCTTTAATCCCGACT
GAGACAACACAGCAGTTCATCGTTAAAAACGGCATCATTAAAGAAGATGAGCTGCGCGGCGAGAACCGTCAGATTTTAAAGGAC
ATCATGGACGACTATTACCGTGGGTTCATCTCAGAAACATTAAGCAGCATCGATGATATCGACTGGACCTCACTGTTTGAGAAG
ATGGAGATTCAACTTAAGAATGGAGACAACAAAGACACTTTAATTAAGGAGCAGACGGAATATCGTAAAGCTATCCATAAAAAA
TTTGCAAACGATGACCGTTTCAAAAATATGTTTTCCGCAAAATTGATTAGCGACATTTTACCTGAATTCGTAATCCATAACAAC
AACTATTCCGCATCTGAAAAAGAGGAGAAGACCCAAGTTATCAAACTTTTTTCACGTTTCGCGACATCTTTTAAAGACTACTTT
AAGAATCGTGCGAATTGTTTCAGTGCAGATGATATTTCGTCTAGTTCATGTCACCGTATCGTGAATGACAACGCTGAGATTTTC
TTTTCTAATGCGTTGGTGTATCGCCGCATCGTAAAGTCCTTGTCGAATGATGATATCAACAAAATTAGTGGTGACATGAAAGAC
TCCCTGAAAGAAATGTCATTAGAGGAGATTTACAGCTACGAAAAATACGGAGAGTTCATCACTCAGGAAGGTATCTCCTTTTAC
AACGATATTTGCGGCAAAGTTAATAGTTTCATGAATCTGTATTGTCAGAAGAATAAGGAAAACAAGAATCTGTACAAGTTACAA
AAGCTTCATAAACAGATCTTGTGCATCGCCGACACGTCTTATGAAGTCCCGTATAAATTTGAAAGCGACGAAGAAGTATATCAG
AGTGTGAATGGATTCTTGGACAATATCTCATCAAAACACATTGTTGAACGTTTGCGCAAAATCGGCGACAACTATAACGGATAC
AACTTGGATAAAATTTATATCGTATCAAAATTTTATGAATCAGTATCCCAAAAGACTTACCGTGATTGGGAGACTATTAATACG
GCGTTAGAAATCCATTACAACAACATTCTGCCGGGTAACGGTAAATCGAAAGCGGACAAAGTGAAGAAGGCGGTTAAGAACGAT
CTTCAGAAGTCTATCACGGAGATTAATGAGCTGGTTTCCAATTACAAGTTGTGCTCGGATGATAACATCAAAGCTGAAACCTAT
ATCCATGAAATTTCTCATATTCTTAATAACTTCGAGGCACAAGAATTAAAATATAACCCAGAAATTCATCTGGTTGAGAGCGAA
CTTAAAGCTTCAGAATTAAAAAATGTTTTGGACGTAATTATGAACGCCTTCCATTGGTGCAGCGTGTTTATGACAGAGGAGTTA
GTAGATAAGGATAACAACTTTTATGCAGAATTGGAAGAGATCTATGATGAGATCTATCCAGTGATTTCACTGTATAACTTAGTC
CGTAATTACGTCACTCAGAAGCCGAGCTCAACTAAAAAGATCAAGTTAAATTTTGGAATTCCGACATTGGCGGATGGTTGGAGT
AAGTCTAAGGAATACTCAAATAACGCTATTATCTTAATGCGTGACAACCTGTATTACTTGGGTATTTTCAATGCCAAAAATAAG
CCCGATAAAAAAATCATTGAAGGGAATACTTCAGAAAATAAGGGAGATTACAAAAAAATGATTTATAACCTTTTGCCAGGCCCA
AACAAAATGATCCCCAAGGTGTTTTTGAGTAGTAAGACGGGAGTAGAAACATATAAGCCATCAGCGTACATTCTTGAAGGGTAC
AAACAAAATAAACACATCAAGAGCAGCAAGGACTTTGACATTACATTTTGTCATGACTTAATCGACTACTTTAAAAATTGCATT
GCCATTCACCCTGAGTGGAAAAATTTTGGTTTCGACTTCAGTGATACCTCTACCTATGAAGATATCTCTGGTTTTTATCGTGAG
GTAGAACTTCAGGGTTACAAGATCGATTGGACGTACATTTCCGAGAAAGACATTGATCTTTTACAAGAGAAGGGTCAGCTTTAC
TTATTTCAGATCTACAATAAAGACTTTTCGAAAAAATCCACGGGCAACGACAACCTTCATACAATGTACTTAAAGAACCTGTTC
TCTGAAGAAAACTTGAAAGATATCGTGCTTAAATTGAATGGCGAGGCCGAGATTTTTTTCCGTAAAAGCTCGATTAAGAATCCC
ATCATCCACAAGAAAGGCAGCATTCTGGTAAATCGTACCTATGAAGCGGAGGAAAAGGACCAATTTGGTAATATTCAGATTGTC
CGTAAGAACATCCCTGAAAATATCTATCAAGAATTATATAAATATTTCAACGATAAGTCGGACAAGGAACTTAGCGATGAAGCC
GCGAAGTTGAAAAATGTTGTTGGTCACCACGAAGCAGCAACAAACATTGTGAAAGACTATCGCTACACTTACGATAAGTACTTT
TTACATATGCCTATTACGATTAACTTTAAGGCAAATAAGACAGGTTTTATCAACGACCGTATCCTGCAATATATTGCAAAAGAG
AAGGACCTGCATGTCATTGGGATTGATCGCGGTGAACGCAATCTGATTTACGTGAGTGTTATTGATACCTGCGGTAATATTGTT
GAGCAAAAGTCTTTTAATATCGTTAATGGTTACGACTACCAAATTAAGCTTAAACAACAGGAAGGTGCCCGCCAGATCGCCCGT
AAGGAGTGGAAGGAAATCGGAAAAATTAAGGAAATCAAAGAGGGATATCTGAGCTTGGTTATTCATGAAATCTCAAAGATGGTT
ATTAAGTACAACGCCATCATCGCTATGGAAGACTTATCGTATGGGTTTAAAAAGGGTCGTTTCAAAGTTGAGCGCCAGGTCTAC
CAAAAGTTTGAAACGATGCTTATTAATAAATTAAACTACTTGGTTTTCAAAGATATCTCTATTACCGAGAATGGAGGTTTACTG
AAAGGATACCAGTTAACGTATATCCCCGATAAGCTTAAAAACGTGGGCCATCAGTGTGGCTGTATTTTCTATGTGCCCGCGGCA
TATACATCAAAAATTGACCCGACGACGGGTTTCGTTAATATCTTCAAGTTCAAAGATCTGACAGTTGATGCAAAACGCGAATTC
ATTAAGAAGTTCGATAGTATTCGCTATGACTCCGAGAAAAATTTGTTTTGCTTCACTTTTGACTACAATAACTTTATTACTCAG
AATACAGTCATGAGTAAAAGCTCCTGGTCGGTTTACACGTACGGGGTACGCATCAAACGTCGTTTTGTGAATGGTCGTTTTAGT
AATGAGTCGGATACAATTGATATTACCAAGGATATGGAGAAGACTCTGGAAATGACAGACATCAATTGGCGTGATGGACATGAT
TTGCGTCAGGACATTATCGACTATGAGATTGTGCAGCATATTTTCGAAATTTTTCGCCTGACGGTGCAAATGCGTAATTCCTTA
AGCGAACTGGAAGATCGCGACTATGACCGCTTAATTTCTCCTGTGCTGAATGAGAACAACATCTTCTATGACTCAGCGAAAGCC
GGGGACGCTTTGCCAAAGGATGCAGATGCTAACGGTGCATATTGTATTGCTCTGAAAGGCCTTTACGAGATCAAACAAATTACT
GAAAACTGGAAGGAAGATGGAAAGTTTTCCCGTGATAAATTGAAGATCTCTAATAAGGACTGGTTTGACTTTATCCAAAATAAA
CGTTATTTA
ErCas12a-Y513S-AA (SEQ ID NO: 76)
MNNGTNNFQNFIGISSLQKTLRNALIPTETTQQFIVKNGIIKEDELRGENRQILKDIMDDYYRGFISETLSSIDDIDWTSLFEK
MEIQLKNGDNKDTLIKEQTEYRKAIHKKFANDDRFKNMFSAKLISDILPEFVIHNNNYSASEKEEKTQVIKLFSRFATSFKDYF
KNRANCFSADDISSSSCHRIVNDNAEIFFSNALVYRRIVKSLSNDDINKISGDMKDSLKEMSLEEIYSYEKYGEFITQEGISFY
NDICGKVNSFMNLYCQKNKENKNLYKLQKLHKQILCIADTSYEVPYKFESDEEVYQSVNGELDNISSKHIVERLRKIGDNYNGY
NLDKIYIVSKFYESVSQKTYRDWETINTALEIHYNNILPGNGKSKADKVKKAVKNDLQKSITEINELVSNYKLCSDDNIKAETY
IHEISHILNNFEAQELKYNPEIHLVESELKASELKNVLDVIMNAFHWCSVFMTEELVDKDNNFYAELEEIYDEIYPVISLYNLV
RNYVTQKPSSTKKIKLNFGIPTLADGWSKSKEYSNNAIILMRDNLYYLGIFNAKNKPDKKIIEGNTSENKGDYKKMIYNLLPGP
NKMIPKVFLSSKTGVETYKPSAYILEGYKQNKHIKSSKDFDITFCHDLIDYFKNCIAIHPEWKNFGFDFSDTSTYEDISGFYRE
VELQGYKIDWTYISEKDIDLLQEKGQLYLFQIYNKDFSKKSTGNDNLHTMYLKNLFSEENLKDIVLKLNGEAEIFFRKSSIKNP
IIHKKGSILVNRTYEAEEKDQFGNIQIVRKNIPENIYQELYKYFNDKSDKELSDEAAKLKNVVGHHEAATNIVKDYRYTYDKYF
LHMPITINFKANKTGFINDRILQYIAKEKDLHVIGIDRGERNLIYVSVIDTCGNIVEQKSFNIVNGYDYQIKLKQQEGARQIAR
KEWKEIGKIKEIKEGYLSLVIHEISKMVIKYNAIIAMEDLSYGFKKGRFKVERQVYQKFETMLINKLNYLVFKDISITENGGLL
KGYQLTYIPDKLKNVGHQCGCIFYVPAAYTSKIDPTTGFVNIFKFKDLTVDAKREFIKKFDSIRYDSEKNLFCFTEDYNNFITQ
NTVMSKSSWSVYTYGVRIKRRFVNGRFSNESDTIDITKDMEKTLEMTDINWRDGHDLRQDIIDYEIVQHIFEIFRLTVQMRNSL
SELEDRDYDRLISPVLNENNIFYDSAKAGDALPKDADANGAYCIALKGLYEIKQITENWKEDGKFSRDKLKISNKDWEDFIQNK
RYL
ErCas12a-Y513R-NT (SEQ ID NO: 77)
atgAATAACGGTACCAATAACTTTCAAAATTTTATCGGGATCTCCTCGTTGCAAAAAACTCTTCGTAATGCTTTAATCCCGACT
GAGACAACACAGCAGTTCATCGTTAAAAACGGCATCATTAAAGAAGATGAGCTGCGCGGCGAGAACCGTCAGATTTTAAAGGAC
ATCATGGACGACTATTACCGTGGGTTCATCTCAGAAACATTAAGCAGCATCGATGATATCGACTGGACCTCACTGTTTGAGAAG
ATGGAGATTCAACTTAAGAATGGAGACAACAAAGACACTTTAATTAAGGAGCAGACGGAATATCGTAAAGCTATCCATAAAAAA
TTTGCAAACGATGACCGTTTCAAAAATATGTTTTCCGCAAAATTGATTAGCGACATTTTACCTGAATTCGTAATCCATAACAAC
AACTATTCCGCATCTGAAAAAGAGGAGAAGACCCAAGTTATCAAACTTTTTTCACGTTTCGCGACATCTTTTAAAGACTACTTT
AAGAATCGTGCGAATTGTTTCAGTGCAGATGATATTTCGTCTAGTTCATGTCACCGTATCGTGAATGACAACGCTGAGATTTTC
TTTTCTAATGCGTTGGTGTATCGCCGCATCGTAAAGTCCTTGTCGAATGATGATATCAACAAAATTAGTGGTGACATGAAAGAC
TCCCTGAAAGAAATGTCATTAGAGGAGATTTACAGCTACGAAAAATACGGAGAGTTCATCACTCAGGAAGGTATCTCCTTTTAC
AACGATATTTGCGGCAAAGTTAATAGTTTCATGAATCTGTATTGTCAGAAGAATAAGGAAAACAAGAATCTGTACAAGTTACAA
AAGCTTCATAAACAGATCTTGTGCATCGCCGACACGTCTTATGAAGTCCCGTATAAATTTGAAAGCGACGAAGAAGTATATCAG
AGTGTGAATGGATTCTTGGACAATATCTCATCAAAACACATTGTTGAACGTTTGCGCAAAATCGGCGACAACTATAACGGATAC
AACTTGGATAAAATTTATATCGTATCAAAATTTTATGAATCAGTATCCCAAAAGACTTACCGTGATTGGGAGACTATTAATACG
GCGTTAGAAATCCATTACAACAACATTCTGCCGGGTAACGGTAAATCGAAAGCGGACAAAGTGAAGAAGGCGGTTAAGAACGAT
CTTCAGAAGTCTATCACGGAGATTAATGAGCTGGTTTCCAATTACAAGTTGTGCTCGGATGATAACATCAAAGCTGAAACCTAT
ATCCATGAAATTTCTCATATTCTTAATAACTTCGAGGCACAAGAATTAAAATATAACCCAGAAATTCATCTGGTTGAGAGCGAA
CTTAAAGCTTCAGAATTAAAAAATGTTTTGGACGTAATTATGAACGCCTTCCATTGGTGCAGCGTGTTTATGACAGAGGAGTTA
GTAGATAAGGATAACAACTTTTATGCAGAATTGGAAGAGATCTATGATGAGATCTATCCAGTGATTTCACTGTATAACTTAGTC
CGTAATTACGTCACTCAGAAGCCGCGTTCAACTAAAAAGATCAAGTTAAATTTTGGAATTCCGACATTGGCGGATGGTTGGAGT
AAGTCTAAGGAATACTCAAATAACGCTATTATCTTAATGCGTGACAACCTGTATTACTTGGGTATTTTCAATGCCAAAAATAAG
CCCGATAAAAAAATCATTGAAGGGAATACTTCAGAAAATAAGGGAGATTACAAAAAAATGATTTATAACCTTTTGCCAGGCCCA
AACAAAATGATCCCCAAGGTGTTTTTGAGTAGTAAGACGGGAGTAGAAACATATAAGCCATCAGCGTACATTCTTGAAGGGTAC
AAACAAAATAAACACATCAAGAGCAGCAAGGACTTTGACATTACATTTTGTCATGACTTAATCGACTACTTTAAAAATTGCATT
GCCATTCACCCTGAGTGGAAAAATTTTGGTTTCGACTTCAGTGATACCTCTACCTATGAAGATATCTCTGGTTTTTATCGTGAG
GTAGAACTTCAGGGTTACAAGATCGATTGGACGTACATTTCCGAGAAAGACATTGATCTTTTACAAGAGAAGGGTCAGCTTTAC
TTATTTCAGATCTACAATAAAGACTTTTCGAAAAAATCCACGGGCAACGACAACCTTCATACAATGTACTTAAAGAACCTGTTC
TCTGAAGAAAACTTGAAAGATATCGTGCTTAAATTGAATGGCGAGGCCGAGATTTTTTTCCGTAAAAGCTCGATTAAGAATCCC
ATCATCCACAAGAAAGGCAGCATTCTGGTAAATCGTACCTATGAAGCGGAGGAAAAGGACCAATTTGGTAATATTCAGATTGTC
CGTAAGAACATCCCTGAAAATATCTATCAAGAATTATATAAATATTTCAACGATAAGTCGGACAAGGAACTTAGCGATGAAGCC
GCGAAGTTGAAAAATGTTGTTGGTCACCACGAAGCAGCAACAAACATTGTGAAAGACTATCGCTACACTTACGATAAGTACTTT
TTACATATGCCTATTACGATTAACTTTAAGGCAAATAAGACAGGTTTTATCAACGACCGTATCCTGCAATATATTGCAAAAGAG
AAGGACCTGCATGTCATTGGGATTGATCGCGGTGAACGCAATCTGATTTACGTGAGTGTTATTGATACCTGCGGTAATATTGTT
GAGCAAAAGTCTTTTAATATCGTTAATGGTTACGACTACCAAATTAAGCTTAAACAACAGGAAGGTGCCCGCCAGATCGCCCGT
AAGGAGTGGAAGGAAATCGGAAAAATTAAGGAAATCAAAGAGGGATATCTGAGCTTGGTTATTCATGAAATCTCAAAGATGGTT
ATTAAGTACAACGCCATCATCGCTATGGAAGACTTATCGTATGGGTTTAAAAAGGGTCGTTTCAAAGTTGAGCGCCAGGTCTAC
CAAAAGTTTGAAACGATGCTTATTAATAAATTAAACTACTTGGTTTTCAAAGATATCTCTATTACCGAGAATGGAGGTTTACTG
AAAGGATACCAGTTAACGTATATCCCCGATAAGCTTAAAAACGTGGGCCATCAGTGTGGCTGTATTTTCTATGTGCCCGCGGCA
TATACATCAAAAATTGACCCGACGACGGGTTTCGTTAATATCTTCAAGTTCAAAGATCTGACAGTTGATGCAAAACGCGAATTC
ATTAAGAAGTTCGATAGTATTCGCTATGACTCCGAGAAAAATTTGTTTTGCTTCACTTTTGACTACAATAACTTTATTACTCAG
AATACAGTCATGAGTAAAAGCTCCTGGTCGGTTTACACGTACGGGGTACGCATCAAACGTCGTTTTGTGAATGGTCGTTTTAGT
AATGAGTCGGATACAATTGATATTACCAAGGATATGGAGAAGACTCTGGAAATGACAGACATCAATTGGCGTGATGGACATGAT
TTGCGTCAGGACATTATCGACTATGAGATTGTGCAGCATATTTTCGAAATTTTTCGCCTGACGGTGCAAATGCGTAATTCCTTA
AGCGAACTGGAAGATCGCGACTATGACCGCTTAATTTCTCCTGTGCTGAATGAGAACAACATCTTCTATGACTCAGCGAAAGCC
GGGGACGCTTTGCCAAAGGATGCAGATGCTAACGGTGCATATTGTATTGCTCTGAAAGGCCTTTACGAGATCAAACAAATTACT
GAAAACTGGAAGGAAGATGGAAAGTTTTCCCGTGATAAATTGAAGATCTCTAATAAGGACTGGTTTGACTTTATCCAAAATAAA
CGTTATTTA
ErCas12a-Y513R-AA (SEQ ID NO: 78)
MNNGTNNFQNFIGISSLQKTLRNALIPTETTQQFIVKNGIIKEDELRGENRQILKDIMDDYYRGFISETLSSIDDIDWTSLFEK
MEIQLKNGDNKDTLIKEQTEYRKAIHKKFANDDRFKNMFSAKLISDILPEFVIHNNNYSASEKEEKTQVIKLFSRFATSFKDYF
KNRANCFSADDISSSSCHRIVNDNAEIFFSNALVYRRIVKSLSNDDINKISGDMKDSLKEMSLEEIYSYEKYGEFITQEGISFY
NDICGKVNSFMNLYCQKNKENKNLYKLQKLHKQILCIADTSYEVPYKFESDEEVYQSVNGELDNISSKHIVERLRKIGDNYNGY
NLDKIYIVSKFYESVSQKTYRDWETINTALEIHYNNILPGNGKSKADKVKKAVKNDLQKSITEINELVSNYKLCSDDNIKAETY
IHEISHILNNFEAQELKYNPEIHLVESELKASELKNVLDVIMNAFHWCSVFMTEELVDKDNNFYAELEEIYDEIYPVISLYNLV
RNYVTQKPRSTKKIKLNFGIPTLADGWSKSKEYSNNAIILMRDNLYYLGIFNAKNKPDKKIIEGNTSENKGDYKKMIYNLLPGP
NKMIPKVFLSSKTGVETYKPSAYILEGYKQNKHIKSSKDFDITFCHDLIDYFKNCIAIHPEWKNFGFDFSDTSTYEDISGFYRE
VELQGYKIDWTYISEKDIDLLQEKGQLYLFQIYNKDFSKKSTGNDNLHTMYLKNLFSEENLKDIVLKLNGEAEIFFRKSSIKNP
IIHKKGSILVNRTYEAEEKDQFGNIQIVRKNIPENIYQELYKYFNDKSDKELSDEAAKLKNVVGHHEAATNIVKDYRYTYDKYF
LHMPITINFKANKTGFINDRILQYIAKEKDLHVIGIDRGERNLIYVSVIDTCGNIVEQKSFNIVNGYDYQIKLKQQEGARQIAR
KEWKEIGKIKEIKEGYLSLVIHEISKMVIKYNAIIAMEDLSYGFKKGRFKVERQVYQKFETMLINKLNYLVFKDISITENGGLL
KGYQLTYIPDKLKNVGHQCGCIFYVPAAYTSKIDPTTGFVNIFKFKDLTVDAKREFIKKFDSIRYDSEKNLFCFTFDYNNFITQ
NTVMSKSSWSVYTYGVRIKRRFVNGRFSNESDTIDITKDMEKTLEMTDINWRDGHDLRQDIIDYEIVQHIFEIFRLTVQMRNSL
SELEDRDYDRLISPVLNENNIFYDSAKAGDALPKDADANGAYCIALKGLYEIKQITENWKEDGKFSRDKLKISNKDWFDFIQNK
RYL
ErCas12a-Y513L-NT (SEQ ID NO: 79)
atgAATAACGGTACCAATAACTTTCAAAATTTTATCGGGATCTCCTCGTTGCAAAAAACTCTTCGTAATGCTTTAATCCCGACT
GAGACAACACAGCAGTTCATCGTTAAAAACGGCATCATTAAAGAAGATGAGCTGCGCGGCGAGAACCGTCAGATTTTAAAGGAC
ATCATGGACGACTATTACCGTGGGTTCATCTCAGAAACATTAAGCAGCATCGATGATATCGACTGGACCTCACTGTTTGAGAAG
ATGGAGATTCAACTTAAGAATGGAGACAACAAAGACACTTTAATTAAGGAGCAGACGGAATATCGTAAAGCTATCCATAAAAAA
TTTGCAAACGATGACCGTTTCAAAAATATGTTTTCCGCAAAATTGATTAGCGACATTTTACCTGAATTCGTAATCCATAACAAC
AACTATTCCGCATCTGAAAAAGAGGAGAAGACCCAAGTTATCAAACTTTTTTCACGTTTCGCGACATCTTTTAAAGACTACTTT
AAGAATCGTGCGAATTGTTTCAGTGCAGATGATATTTCGTCTAGTTCATGTCACCGTATCGTGAATGACAACGCTGAGATTTTC
TTTTCTAATGCGTTGGTGTATCGCCGCATCGTAAAGTCCTTGTCGAATGATGATATCAACAAAATTAGTGGTGACATGAAAGAC
TCCCTGAAAGAAATGTCATTAGAGGAGATTTACAGCTACGAAAAATACGGAGAGTTCATCACTCAGGAAGGTATCTCCTTTTAC
AACGATATTTGCGGCAAAGTTAATAGTTTCATGAATCTGTATTGTCAGAAGAATAAGGAAAACAAGAATCTGTACAAGTTACAA
AAGCTTCATAAACAGATCTTGTGCATCGCCGACACGTCTTATGAAGTCCCGTATAAATTTGAAAGCGACGAAGAAGTATATCAG
AGTGTGAATGGATTCTTGGACAATATCTCATCAAAACACATTGTTGAACGTTTGCGCAAAATCGGCGACAACTATAACGGATAC
AACTTGGATAAAATTTATATCGTATCAAAATTTTATGAATCAGTATCCCAAAAGACTTACCGTGATTGGGAGACTATTAATACG
GCGTTAGAAATCCATTACAACAACATTCTGCCGGGTAACGGTAAATCGAAAGCGGACAAAGTGAAGAAGGCGGTTAAGAACGAT
CTTCAGAAGTCTATCACGGAGATTAATGAGCTGGTTTCCAATTACAAGTTGTGCTCGGATGATAACATCAAAGCTGAAACCTAT
ATCCATGAAATTTCTCATATTCTTAATAACTTCGAGGCACAAGAATTAAAATATAACCCAGAAATTCATCTGGTTGAGAGCGAA
CTTAAAGCTTCAGAATTAAAAAATGTTTTGGACGTAATTATGAACGCCTTCCATTGGTGCAGCGTGTTTATGACAGAGGAGTTA
GTAGATAAGGATAACAACTTTTATGCAGAATTGGAAGAGATCTATGATGAGATCTATCCAGTGATTTCACTGTATAACTTAGTC
CGTAATTACGTCACTCAGAAGCCGCTGTCAACTAAAAAGATCAAGTTAAATTTTGGAATTCCGACATTGGCGGATGGTTGGAGT
AAGTCTAAGGAATACTCAAATAACGCTATTATCTTAATGCGTGACAACCTGTATTACTTGGGTATTTTCAATGCCAAAAATAAG
CCCGATAAAAAAATCATTGAAGGGAATACTTCAGAAAATAAGGGAGATTACAAAAAAATGATTTATAACCTTTTGCCAGGCCCA
AACAAAATGATCCCCAAGGTGTTTTTGAGTAGTAAGACGGGAGTAGAAACATATAAGCCATCAGCGTACATTCTTGAAGGGTAC
AAACAAAATAAACACATCAAGAGCAGCAAGGACTTTGACATTACATTTTGTCATGACTTAATCGACTACTTTAAAAATTGCATT
GCCATTCACCCTGAGTGGAAAAATTTTGGTTTCGACTTCAGTGATACCTCTACCTATGAAGATATCTCTGGTTTTTATCGTGAG
GTAGAACTTCAGGGTTACAAGATCGATTGGACGTACATTTCCGAGAAAGACATTGATCTTTTACAAGAGAAGGGTCAGCTTTAC
TTATTTCAGATCTACAATAAAGACTTTTCGAAAAAATCCACGGGCAACGACAACCTTCATACAATGTACTTAAAGAACCTGTTC
TCTGAAGAAAACTTGAAAGATATCGTGCTTAAATTGAATGGCGAGGCCGAGATTTTTTTCCGTAAAAGCTCGATTAAGAATCCC
ATCATCCACAAGAAAGGCAGCATTCTGGTAAATCGTACCTATGAAGCGGAGGAAAAGGACCAATTTGGTAATATTCAGATTGTC
CGTAAGAACATCCCTGAAAATATCTATCAAGAATTATATAAATATTTCAACGATAAGTCGGACAAGGAACTTAGCGATGAAGCC
GCGAAGTTGAAAAATGTTGTTGGTCACCACGAAGCAGCAACAAACATTGTGAAAGACTATCGCTACACTTACGATAAGTACTTT
TTACATATGCCTATTACGATTAACTTTAAGGCAAATAAGACAGGTTTTATCAACGACCGTATCCTGCAATATATTGCAAAAGAG
AAGGACCTGCATGTCATTGGGATTGATCGCGGTGAACGCAATCTGATTTACGTGAGTGTTATTGATACCTGCGGTAATATTGTT
GAGCAAAAGTCTTTTAATATCGTTAATGGTTACGACTACCAAATTAAGCTTAAACAACAGGAAGGTGCCCGCCAGATCGCCCGT
AAGGAGTGGAAGGAAATCGGAAAAATTAAGGAAATCAAAGAGGGATATCTGAGCTTGGTTATTCATGAAATCTCAAAGATGGTT
ATTAAGTACAACGCCATCATCGCTATGGAAGACTTATCGTATGGGTTTAAAAAGGGTCGTTTCAAAGTTGAGCGCCAGGTCTAC
CAAAAGTTTGAAACGATGCTTATTAATAAATTAAACTACTTGGTTTTCAAAGATATCTCTATTACCGAGAATGGAGGTTTACTG
AAAGGATACCAGTTAACGTATATCCCCGATAAGCTTAAAAACGTGGGCCATCAGTGTGGCTGTATTTTCTATGTGCCCGCGGCA
TATACATCAAAAATTGACCCGACGACGGGTTTCGTTAATATCTTCAAGTTCAAAGATCTGACAGTTGATGCAAAACGCGAATTC
ATTAAGAAGTTCGATAGTATTCGCTATGACTCCGAGAAAAATTTGTTTTGCTTCACTTTTGACTACAATAACTTTATTACTCAG
AATACAGTCATGAGTAAAAGCTCCTGGTCGGTTTACACGTACGGGGTACGCATCAAACGTCGTTTTGTGAATGGTCGTTTTAGT
AATGAGTCGGATACAATTGATATTACCAAGGATATGGAGAAGACTCTGGAAATGACAGACATCAATTGGCGTGATGGACATGAT
TTGCGTCAGGACATTATCGACTATGAGATTGTGCAGCATATTTTCGAAATTTTTCGCCTGACGGTGCAAATGCGTAATTCCTTA
AGCGAACTGGAAGATCGCGACTATGACCGCTTAATTTCTCCTGTGCTGAATGAGAACAACATCTTCTATGACTCAGCGAAAGCC
GGGGACGCTTTGCCAAAGGATGCAGATGCTAACGGTGCATATTGTATTGCTCTGAAAGGCCTTTACGAGATCAAACAAATTACT
GAAAACTGGAAGGAAGATGGAAAGTTTTCCCGTGATAAATTGAAGATCTCTAATAAGGACTGGTTTGACTTTATCCAAAATAAA
CGTTATTTA
ErCas12a-Y513L-AA (SEQ ID NO: 80)
MNNGTNNFQNFIGISSLQKTLRNALIPTETTQQFIVKNGIIKEDELRGENRQILKDIMDDYYRGFISETLSSIDDIDWTSLFEK
MEIQLKNGDNKDTLIKEQTEYRKAIHKKFANDDRFKNMFSAKLISDILPEFVIHNNNYSASEKEEKTQVIKLFSRFATSFKDYF
KNRANCESADDISSSSCHRIVNDNAEIFFSNALVYRRIVKSLSNDDINKISGDMKDSLKEMSLEEIYSYEKYGEFITQEGISFY
NDICGKVNSFMNLYCQKNKENKNLYKLQKLHKQILCIADTSYEVPYKFESDEEVYQSVNGELDNISSKHIVERLRKIGDNYNGY
NLDKIYIVSKFYESVSQKTYRDWETINTALEIHYNNILPGNGKSKADKVKKAVKNDLQKSITEINELVSNYKLCSDDNIKAETY
IHEISHILNNFEAQELKYNPEIHLVESELKASELKNVLDVIMNAFHWCSVFMTEELVDKDNNFYAELEEIYDEIYPVISLYNLV
RNYVTQKPLSTKKIKLNFGIPTLADGWSKSKEYSNNAIILMRDNLYYLGIFNAKNKPDKKIIEGNTSENKGDYKKMIYNLLPGP
NKMIPKVFLSSKTGVETYKPSAYILEGYKQNKHIKSSKDFDITFCHDLIDYFKNCIAIHPEWKNFGFDFSDTSTYEDISGFYRE
VELQGYKIDWTYISEKDIDLLQEKGQLYLFQIYNKDFSKKSTGNDNLHTMYLKNLFSEENLKDIVLKLNGEAEIFFRKSSIKNP
IIHKKGSILVNRTYEAEEKDQFGNIQIVRKNIPENIYQELYKYFNDKSDKELSDEAAKLKNVVGHHEAATNIVKDYRYTYDKYF
LHMPITINFKANKTGFINDRILQYIAKEKDLHVIGIDRGERNLIYVSVIDTCGNIVEQKSFNIVNGYDYQIKLKQQEGARQIAR
KEWKEIGKIKEIKEGYLSLVIHEISKMVIKYNAIIAMEDLSYGFKKGRFKVERQVYQKFETMLINKLNYLVFKDISITENGGLL
KGYQLTYIPDKLKNVGHQCGCIFYVPAAYTSKIDPTTGFVNIFKFKDLTVDAKREFIKKFDSIRYDSEKNLFCFTEDYNNFITQ
NTVMSKSSWSVYTYGVRIKRRFVNGRFSNESDTIDITKDMEKTLEMTDINWRDGHDLRQDIIDYEIVQHIFEIFRLTVQMRNSL
SELEDRDYDRLISPVLNENNIFYDSAKAGDALPKDADANGAYCIALKGLYEIKQITENWKEDGKFSRDKLKISNKDWFDFIQNK
RYL
ErCas12a-Y513G-NT (SEQ ID NO: 81)
atgAATAACGGTACCAATAACTTTCAAAATTTTATCGGGATCTCCTCGTTGCAAAAAACTCTTCGTAATGCTTTAATCCCGACT
GAGACAACACAGCAGTTCATCGTTAAAAACGGCATCATTAAAGAAGATGAGCTGCGCGGCGAGAACCGTCAGATTTTAAAGGAC
ATCATGGACGACTATTACCGTGGGTTCATCTCAGAAACATTAAGCAGCATCGATGATATCGACTGGACCTCACTGTTTGAGAAG
ATGGAGATTCAACTTAAGAATGGAGACAACAAAGACACTTTAATTAAGGAGCAGACGGAATATCGTAAAGCTATCCATAAAAAA
TTTGCAAACGATGACCGTTTCAAAAATATGTTTTCCGCAAAATTGATTAGCGACATTTTACCTGAATTCGTAATCCATAACAAC
AACTATTCCGCATCTGAAAAAGAGGAGAAGACCCAAGTTATCAAACTTTTTTCACGTTTCGCGACATCTTTTAAAGACTACTTT
AAGAATCGTGCGAATTGTTTCAGTGCAGATGATATTTCGTCTAGTTCATGTCACCGTATCGTGAATGACAACGCTGAGATTTTC
TTTTCTAATGCGTTGGTGTATCGCCGCATCGTAAAGTCCTTGTCGAATGATGATATCAACAAAATTAGTGGTGACATGAAAGAC
TCCCTGAAAGAAATGTCATTAGAGGAGATTTACAGCTACGAAAAATACGGAGAGTTCATCACTCAGGAAGGTATCTCCTTTTAC
AACGATATTTGCGGCAAAGTTAATAGTTTCATGAATCTGTATTGTCAGAAGAATAAGGAAAACAAGAATCTGTACAAGTTACAA
AAGCTTCATAAACAGATCTTGTGCATCGCCGACACGTCTTATGAAGTCCCGTATAAATTTGAAAGCGACGAAGAAGTATATCAG
AGTGTGAATGGATTCTTGGACAATATCTCATCAAAACACATTGTTGAACGTTTGCGCAAAATCGGCGACAACTATAACGGATAC
AACTTGGATAAAATTTATATCGTATCAAAATTTTATGAATCAGTATCCCAAAAGACTTACCGTGATTGGGAGACTATTAATACG
GCGTTAGAAATCCATTACAACAACATTCTGCCGGGTAACGGTAAATCGAAAGCGGACAAAGTGAAGAAGGCGGTTAAGAACGAT
CTTCAGAAGTCTATCACGGAGATTAATGAGCTGGTTTCCAATTACAAGTTGTGCTCGGATGATAACATCAAAGCTGAAACCTAT
ATCCATGAAATTTCTCATATTCTTAATAACTTCGAGGCACAAGAATTAAAATATAACCCAGAAATTCATCTGGTTGAGAGCGAA
CTTAAAGCTTCAGAATTAAAAAATGTTTTGGACGTAATTATGAACGCCTTCCATTGGTGCAGCGTGTTTATGACAGAGGAGTTA
GTAGATAAGGATAACAACTTTTATGCAGAATTGGAAGAGATCTATGATGAGATCTATCCAGTGATTTCACTGTATAACTTAGTC
CGTAATTACGTCACTCAGAAGCCGGGCTCAACTAAAAAGATCAAGTTAAATTTTGGAATTCCGACATTGGCGGATGGTTGGAGT
AAGTCTAAGGAATACTCAAATAACGCTATTATCTTAATGCGTGACAACCTGTATTACTTGGGTATTTTCAATGCCAAAAATAAG
CCCGATAAAAAAATCATTGAAGGGAATACTTCAGAAAATAAGGGAGATTACAAAAAAATGATTTATAACCTTTTGCCAGGCCCA
AACAAAATGATCCCCAAGGTGTTTTTGAGTAGTAAGACGGGAGTAGAAACATATAAGCCATCAGCGTACATTCTTGAAGGGTAC
AAACAAAATAAACACATCAAGAGCAGCAAGGACTTTGACATTACATTTTGTCATGACTTAATCGACTACTTTAAAAATTGCATT
GCCATTCACCCTGAGTGGAAAAATTTTGGTTTCGACTTCAGTGATACCTCTACCTATGAAGATATCTCTGGTTTTTATCGTGAG
GTAGAACTTCAGGGTTACAAGATCGATTGGACGTACATTTCCGAGAAAGACATTGATCTTTTACAAGAGAAGGGTCAGCTTTAC
TTATTTCAGATCTACAATAAAGACTTTTCGAAAAAATCCACGGGCAACGACAACCTTCATACAATGTACTTAAAGAACCTGTTC
TCTGAAGAAAACTTGAAAGATATCGTGCTTAAATTGAATGGCGAGGCCGAGATTTTTTTCCGTAAAAGCTCGATTAAGAATCCC
ATCATCCACAAGAAAGGCAGCATTCTGGTAAATCGTACCTATGAAGCGGAGGAAAAGGACCAATTTGGTAATATTCAGATTGTC
CGTAAGAACATCCCTGAAAATATCTATCAAGAATTATATAAATATTTCAACGATAAGTCGGACAAGGAACTTAGCGATGAAGCC
GCGAAGTTGAAAAATGTTGTTGGTCACCACGAAGCAGCAACAAACATTGTGAAAGACTATCGCTACACTTACGATAAGTACTTT
TTACATATGCCTATTACGATTAACTTTAAGGCAAATAAGACAGGTTTTATCAACGACCGTATCCTGCAATATATTGCAAAAGAG
AAGGACCTGCATGTCATTGGGATTGATCGCGGTGAACGCAATCTGATTTACGTGAGTGTTATTGATACCTGCGGTAATATTGTT
GAGCAAAAGTCTTTTAATATCGTTAATGGTTACGACTACCAAATTAAGCTTAAACAACAGGAAGGTGCCCGCCAGATCGCCCGT
AAGGAGTGGAAGGAAATCGGAAAAATTAAGGAAATCAAAGAGGGATATCTGAGCTTGGTTATTCATGAAATCTCAAAGATGGTT
ATTAAGTACAACGCCATCATCGCTATGGAAGACTTATCGTATGGGTTTAAAAAGGGTCGTTTCAAAGTTGAGCGCCAGGTCTAC
CAAAAGTTTGAAACGATGCTTATTAATAAATTAAACTACTTGGTTTTCAAAGATATCTCTATTACCGAGAATGGAGGTTTACTG
AAAGGATACCAGTTAACGTATATCCCCGATAAGCTTAAAAACGTGGGCCATCAGTGTGGCTGTATTTTCTATGTGCCCGCGGCA
TATACATCAAAAATTGACCCGACGACGGGTTTCGTTAATATCTTCAAGTTCAAAGATCTGACAGTTGATGCAAAACGCGAATTC
ATTAAGAAGTTCGATAGTATTCGCTATGACTCCGAGAAAAATTTGTTTTGCTTCACTTTTGACTACAATAACTTTATTACTCAG
AATACAGTCATGAGTAAAAGCTCCTGGTCGGTTTACACGTACGGGGTACGCATCAAACGTCGTTTTGTGAATGGTCGTTTTAGT
AATGAGTCGGATACAATTGATATTACCAAGGATATGGAGAAGACTCTGGAAATGACAGACATCAATTGGCGTGATGGACATGAT
TTGCGTCAGGACATTATCGACTATGAGATTGTGCAGCATATTTTCGAAATTTTTCGCCTGACGGTGCAAATGCGTAATTCCTTA
AGCGAACTGGAAGATCGCGACTATGACCGCTTAATTTCTCCTGTGCTGAATGAGAACAACATCTTCTATGACTCAGCGAAAGCC
GGGGACGCTTTGCCAAAGGATGCAGATGCTAACGGTGCATATTGTATTGCTCTGAAAGGCCTTTACGAGATCAAACAAATTACT
GAAAACTGGAAGGAAGATGGAAAGTTTTCCCGTGATAAATTGAAGATCTCTAATAAGGACTGGTTTGACTTTATCCAAAATAAA
CGTTATTTA
ErCas12a-Y513G-AA (SEQ ID NO: 82)
MNNGTNNFQNFIGISSLQKTLRNALIPTETTQQFIVKNGIIKEDELRGENRQILKDIMDDYYRGFISETLSSIDDIDWTSLFEK
MEIQLKNGDNKDTLIKEQTEYRKAIHKKFANDDRFKNMFSAKLISDILPEFVIHNNNYSASEKEEKTQVIKLFSRFATSFKDYF
KNRANCESADDISSSSCHRIVNDNAEIFFSNALVYRRIVKSLSNDDINKISGDMKDSLKEMSLEEIYSYEKYGEFITQEGISFY
NDICGKVNSFMNLYCQKNKENKNLYKLQKLHKQILCIADTSYEVPYKFESDEEVYQSVNGELDNISSKHIVERLRKIGDNYNGY
NLDKIYIVSKFYESVSQKTYRDWETINTALEIHYNNILPGNGKSKADKVKKAVKNDLQKSITEINELVSNYKLCSDDNIKAETY
IHEISHILNNFEAQELKYNPEIHLVESELKASELKNVLDVIMNAFHWCSVFMTEELVDKDNNFYAELEEIYDEIYPVISLYNLV
RNYVTQKPGSTKKIKLNFGIPTLADGWSKSKEYSNNAIILMRDNLYYLGIFNAKNKPDKKIIEGNTSENKGDYKKMIYNLLPGP
NKMIPKVFLSSKTGVETYKPSAYILEGYKQNKHIKSSKDFDITFCHDLIDYFKNCIAIHPEWKNFGFDFSDTSTYEDISGFYRE
VELQGYKIDWTYISEKDIDLLQEKGQLYLFQIYNKDFSKKSTGNDNLHTMYLKNLFSEENLKDIVLKLNGEAEIFFRKSSIKNP
IIHKKGSILVNRTYEAEEKDQFGNIQIVRKNIPENIYQELYKYFNDKSDKELSDEAAKLKNVVGHHEAATNIVKDYRYTYDKYF
LHMPITINFKANKTGFINDRILQYIAKEKDLHVIGIDRGERNLIYVSVIDTCGNIVEQKSFNIVNGYDYQIKLKQQEGARQIAR
KEWKEIGKIKEIKEGYLSLVIHEISKMVIKYNAIIAMEDLSYGFKKGRFKVERQVYQKFETMLINKLNYLVFKDISITENGGLL
KGYQLTYIPDKLKNVGHQCGCIFYVPAAYTSKIDPTTGFVNIFKFKDLTVDAKREFIKKFDSIRYDSEKNLFCFTFDYNNFITQ
NTVMSKSSWSVYTYGVRIKRRFVNGRESNESDTIDITKDMEKTLEMTDINWRDGHDLRQDIIDYEIVQHIFEIFRLTVQMRNSL
SELEDRDYDRLISPVLNENNIFYDSAKAGDALPKDADANGAYCIALKGLYEIKQITENWKEDGKFSRDKLKISNKDWFDFIQNK
RYL
ErCas12a-S514R-NT (SEQ ID NO: 83)
atgAATAACGGTACCAATAACTTTCAAAATTTTATCGGGATCTCCTCGTTGCAAAAAACTCTTCGTAATGCTTTAATCCCGACT
GAGACAACACAGCAGTTCATCGTTAAAAACGGCATCATTAAAGAAGATGAGCTGCGCGGCGAGAACCGTCAGATTTTAAAGGAC
ATCATGGACGACTATTACCGTGGGTTCATCTCAGAAACATTAAGCAGCATCGATGATATCGACTGGACCTCACTGTTTGAGAAG
ATGGAGATTCAACTTAAGAATGGAGACAACAAAGACACTTTAATTAAGGAGCAGACGGAATATCGTAAAGCTATCCATAAAAAA
TTTGCAAACGATGACCGTTTCAAAAATATGTTTTCCGCAAAATTGATTAGCGACATTTTACCTGAATTCGTAATCCATAACAAC
AACTATTCCGCATCTGAAAAAGAGGAGAAGACCCAAGTTATCAAACTTTTTTCACGTTTCGCGACATCTTTTAAAGACTACTTT
AAGAATCGTGCGAATTGTTTCAGTGCAGATGATATTTCGTCTAGTTCATGTCACCGTATCGTGAATGACAACGCTGAGATTTTC
TTTTCTAATGCGTTGGTGTATCGCCGCATCGTAAAGTCCTTGTCGAATGATGATATCAACAAAATTAGTGGTGACATGAAAGAC
TCCCTGAAAGAAATGTCATTAGAGGAGATTTACAGCTACGAAAAATACGGAGAGTTCATCACTCAGGAAGGTATCTCCTTTTAC
AACGATATTTGCGGCAAAGTTAATAGTTTCATGAATCTGTATTGTCAGAAGAATAAGGAAAACAAGAATCTGTACAAGTTACAA
AAGCTTCATAAACAGATCTTGTGCATCGCCGACACGTCTTATGAAGTCCCGTATAAATTTGAAAGCGACGAAGAAGTATATCAG
AGTGTGAATGGATTCTTGGACAATATCTCATCAAAACACATTGTTGAACGTTTGCGCAAAATCGGCGACAACTATAACGGATAC
AACTTGGATAAAATTTATATCGTATCAAAATTTTATGAATCAGTATCCCAAAAGACTTACCGTGATTGGGAGACTATTAATACG
GCGTTAGAAATCCATTACAACAACATTCTGCCGGGTAACGGTAAATCGAAAGCGGACAAAGTGAAGAAGGCGGTTAAGAACGAT
CTTCAGAAGTCTATCACGGAGATTAATGAGCTGGTTTCCAATTACAAGTTGTGCTCGGATGATAACATCAAAGCTGAAACCTAT
ATCCATGAAATTTCTCATATTCTTAATAACTTCGAGGCACAAGAATTAAAATATAACCCAGAAATTCATCTGGTTGAGAGCGAA
CTTAAAGCTTCAGAATTAAAAAATGTTTTGGACGTAATTATGAACGCCTTCCATTGGTGCAGCGTGTTTATGACAGAGGAGTTA
GTAGATAAGGATAACAACTTTTATGCAGAATTGGAAGAGATCTATGATGAGATCTATCCAGTGATTTCACTGTATAACTTAGTC
CGTAATTACGTCACTCAGAAGCCGTACCGTACTAAAAAGATCAAGTTAAATTTTGGAATTCCGACATTGGCGGATGGTTGGAGT
AAGTCTAAGGAATACTCAAATAACGCTATTATCTTAATGCGTGACAACCTGTATTACTTGGGTATTTTCAATGCCAAAAATAAG
CCCGATAAAAAAATCATTGAAGGGAATACTTCAGAAAATAAGGGAGATTACAAAAAAATGATTTATAACCTTTTGCCAGGCCCA
AACAAAATGATCCCCAAGGTGTTTTTGAGTAGTAAGACGGGAGTAGAAACATATAAGCCATCAGCGTACATTCTTGAAGGGTAC
AAACAAAATAAACACATCAAGAGCAGCAAGGACTTTGACATTACATTTTGTCATGACTTAATCGACTACTTTAAAAATTGCATT
GCCATTCACCCTGAGTGGAAAAATTTTGGTTTCGACTTCAGTGATACCTCTACCTATGAAGATATCTCTGGTTTTTATCGTGAG
GTAGAACTTCAGGGTTACAAGATCGATTGGACGTACATTTCCGAGAAAGACATTGATCTTTTACAAGAGAAGGGTCAGCTTTAC
TTATTTCAGATCTACAATAAAGACTTTTCGAAAAAATCCACGGGCAACGACAACCTTCATACAATGTACTTAAAGAACCTGTTC
TCTGAAGAAAACTTGAAAGATATCGTGCTTAAATTGAATGGCGAGGCCGAGATTTTTTTCCGTAAAAGCTCGATTAAGAATCCC
ATCATCCACAAGAAAGGCAGCATTCTGGTAAATCGTACCTATGAAGCGGAGGAAAAGGACCAATTTGGTAATATTCAGATTGTC
CGTAAGAACATCCCTGAAAATATCTATCAAGAATTATATAAATATTTCAACGATAAGTCGGACAAGGAACTTAGCGATGAAGCC
GCGAAGTTGAAAAATGTTGTTGGTCACCACGAAGCAGCAACAAACATTGTGAAAGACTATCGCTACACTTACGATAAGTACTTT
TTACATATGCCTATTACGATTAACTTTAAGGCAAATAAGACAGGTTTTATCAACGACCGTATCCTGCAATATATTGCAAAAGAG
AAGGACCTGCATGTCATTGGGATTGATCGCGGTGAACGCAATCTGATTTACGTGAGTGTTATTGATACCTGCGGTAATATTGTT
GAGCAAAAGTCTTTTAATATCGTTAATGGTTACGACTACCAAATTAAGCTTAAACAACAGGAAGGTGCCCGCCAGATCGCCCGT
AAGGAGTGGAAGGAAATCGGAAAAATTAAGGAAATCAAAGAGGGATATCTGAGCTTGGTTATTCATGAAATCTCAAAGATGGTT
ATTAAGTACAACGCCATCATCGCTATGGAAGACTTATCGTATGGGTTTAAAAAGGGTCGTTTCAAAGTTGAGCGCCAGGTCTAC
CAAAAGTTTGAAACGATGCTTATTAATAAATTAAACTACTTGGTTTTCAAAGATATCTCTATTACCGAGAATGGAGGTTTACTG
AAAGGATACCAGTTAACGTATATCCCCGATAAGCTTAAAAACGTGGGCCATCAGTGTGGCTGTATTTTCTATGTGCCCGCGGCA
TATACATCAAAAATTGACCCGACGACGGGTTTCGTTAATATCTTCAAGTTCAAAGATCTGACAGTTGATGCAAAACGCGAATTC
ATTAAGAAGTTCGATAGTATTCGCTATGACTCCGAGAAAAATTTGTTTTGCTTCACTTTTGACTACAATAACTTTATTACTCAG
AATACAGTCATGAGTAAAAGCTCCTGGTCGGTTTACACGTACGGGGTACGCATCAAACGTCGTTTTGTGAATGGTCGTTTTAGT
AATGAGTCGGATACAATTGATATTACCAAGGATATGGAGAAGACTCTGGAAATGACAGACATCAATTGGCGTGATGGACATGAT
TTGCGTCAGGACATTATCGACTATGAGATTGTGCAGCATATTTTCGAAATTTTTCGCCTGACGGTGCAAATGCGTAATTCCTTA
AGCGAACTGGAAGATCGCGACTATGACCGCTTAATTTCTCCTGTGCTGAATGAGAACAACATCTTCTATGACTCAGCGAAAGCC
GGGGACGCTTTGCCAAAGGATGCAGATGCTAACGGTGCATATTGTATTGCTCTGAAAGGCCTTTACGAGATCAAACAAATTACT
GAAAACTGGAAGGAAGATGGAAAGTTTTCCCGTGATAAATTGAAGATCTCTAATAAGGACTGGTTTGACTTTATCCAAAATAAA
CGTTATTTA
ErCas12a-S514R-AA (SEQ ID NO: 84)
MNNGTNNFQNFIGISSLQKTLRNALIPTETTQQFIVKNGIIKEDELRGENRQILKDIMDDYYRGFISETLSSIDDIDWTSLFEK
MEIQLKNGDNKDTLIKEQTEYRKAIHKKFANDDRFKNMFSAKLISDILPEFVIHNNNYSASEKEEKTQVIKLFSRFATSFKDYF
KNRANCESADDISSSSCHRIVNDNAEIFFSNALVYRRIVKSLSNDDINKISGDMKDSLKEMSLEEIYSYEKYGEFITQEGISFY
NDICGKVNSFMNLYCQKNKENKNLYKLQKLHKQILCIADTSYEVPYKFESDEEVYQSVNGELDNISSKHIVERLRKIGDNYNGY
NLDKIYIVSKFYESVSQKTYRDWETINTALEIHYNNILPGNGKSKADKVKKAVKNDLQKSITEINELVSNYKLCSDDNIKAETY
IHEISHILNNFEAQELKYNPEIHLVESELKASELKNVLDVIMNAFHWCSVFMTEELVDKDNNFYAELEEIYDEIYPVISLYNLV
RNYVTQKPYRTKKIKLNFGIPTLADGWSKSKEYSNNAIILMRDNLYYLGIFNAKNKPDKKIIEGNTSENKGDYKKMIYNLLPGP
NKMIPKVFLSSKTGVETYKPSAYILEGYKQNKHIKSSKDFDITFCHDLIDYFKNCIAIHPEWKNFGFDFSDTSTYEDISGFYRE
VELQGYKIDWTYISEKDIDLLQEKGQLYLFQIYNKDFSKKSTGNDNLHTMYLKNLFSEENLKDIVLKLNGEAEIFFRKSSIKNP
IIHKKGSILVNRTYEAEEKDQFGNIQIVRKNIPENIYQELYKYFNDKSDKELSDEAAKLKNVVGHHEAATNIVKDYRYTYDKYF
LHMPITINFKANKTGFINDRILQYIAKEKDLHVIGIDRGERNLIYVSVIDTCGNIVEQKSFNIVNGYDYQIKLKQQEGARQIAR
KEWKEIGKIKEIKEGYLSLVIHEISKMVIKYNAIIAMEDLSYGFKKGRFKVERQVYQKFETMLINKLNYLVFKDISITENGGLL
KGYQLTYIPDKLKNVGHQCGCIFYVPAAYTSKIDPTTGFVNIFKFKDLTVDAKREFIKKFDSIRYDSEKNLFCFTFDYNNFITQ
NTVMSKSSWSVYTYGVRIKRRFVNGRFSNESDTIDITKDMEKTLEMTDINWRDGHDLRQDIIDYEIVQHIFEIFRLTVQMRNSL
SELEDRDYDRLISPVLNENNIFYDSAKAGDALPKDADANGAYCIALKGLYEIKQITENWKEDGKFSRDKLKISNKDWEDFIQNK
RYL
ErCas12a-S514P-NT (SEQ ID NO: 85)
atgAATAACGGTACCAATAACTTTCAAAATTTTATCGGGATCTCCTCGTTGCAAAAAACTCTTCGTAATGCTTTAATCCCGACT
GAGACAACACAGCAGTTCATCGTTAAAAACGGCATCATTAAAGAAGATGAGCTGCGCGGCGAGAACCGTCAGATTTTAAAGGAC
ATCATGGACGACTATTACCGTGGGTTCATCTCAGAAACATTAAGCAGCATCGATGATATCGACTGGACCTCACTGTTTGAGAAG
ATGGAGATTCAACTTAAGAATGGAGACAACAAAGACACTTTAATTAAGGAGCAGACGGAATATCGTAAAGCTATCCATAAAAAA
TTTGCAAACGATGACCGTTTCAAAAATATGTTTTCCGCAAAATTGATTAGCGACATTTTACCTGAATTCGTAATCCATAACAAC
AACTATTCCGCATCTGAAAAAGAGGAGAAGACCCAAGTTATCAAACTTTTTTCACGTTTCGCGACATCTTTTAAAGACTACTTT
AAGAATCGTGCGAATTGTTTCAGTGCAGATGATATTTCGTCTAGTTCATGTCACCGTATCGTGAATGACAACGCTGAGATTTTC
TTTTCTAATGCGTTGGTGTATCGCCGCATCGTAAAGTCCTTGTCGAATGATGATATCAACAAAATTAGTGGTGACATGAAAGAC
TCCCTGAAAGAAATGTCATTAGAGGAGATTTACAGCTACGAAAAATACGGAGAGTTCATCACTCAGGAAGGTATCTCCTTTTAC
AACGATATTTGCGGCAAAGTTAATAGTTTCATGAATCTGTATTGTCAGAAGAATAAGGAAAACAAGAATCTGTACAAGTTACAA
AAGCTTCATAAACAGATCTTGTGCATCGCCGACACGTCTTATGAAGTCCCGTATAAATTTGAAAGCGACGAAGAAGTATATCAG
AGTGTGAATGGATTCTTGGACAATATCTCATCAAAACACATTGTTGAACGTTTGCGCAAAATCGGCGACAACTATAACGGATAC
AACTTGGATAAAATTTATATCGTATCAAAATTTTATGAATCAGTATCCCAAAAGACTTACCGTGATTGGGAGACTATTAATACG
GCGTTAGAAATCCATTACAACAACATTCTGCCGGGTAACGGTAAATCGAAAGCGGACAAAGTGAAGAAGGCGGTTAAGAACGAT
CTTCAGAAGTCTATCACGGAGATTAATGAGCTGGTTTCCAATTACAAGTTGTGCTCGGATGATAACATCAAAGCTGAAACCTAT
ATCCATGAAATTTCTCATATTCTTAATAACTTCGAGGCACAAGAATTAAAATATAACCCAGAAATTCATCTGGTTGAGAGCGAA
CTTAAAGCTTCAGAATTAAAAAATGTTTTGGACGTAATTATGAACGCCTTCCATTGGTGCAGCGTGTTTATGACAGAGGAGTTA
GTAGATAAGGATAACAACTTTTATGCAGAATTGGAAGAGATCTATGATGAGATCTATCCAGTGATTTCACTGTATAACTTAGTC
CGTAATTACGTCACTCAGAAGCCGTACCCGACTAAAAAGATCAAGTTAAATTTTGGAATTCCGACATTGGCGGATGGTTGGAGT
AAGTCTAAGGAATACTCAAATAACGCTATTATCTTAATGCGTGACAACCTGTATTACTTGGGTATTTTCAATGCCAAAAATAAG
CCCGATAAAAAAATCATTGAAGGGAATACTTCAGAAAATAAGGGAGATTACAAAAAAATGATTTATAACCTTTTGCCAGGCCCA
AACAAAATGATCCCCAAGGTGTTTTTGAGTAGTAAGACGGGAGTAGAAACATATAAGCCATCAGCGTACATTCTTGAAGGGTAC
AAACAAAATAAACACATCAAGAGCAGCAAGGACTTTGACATTACATTTTGTCATGACTTAATCGACTACTTTAAAAATTGCATT
GCCATTCACCCTGAGTGGAAAAATTTTGGTTTCGACTTCAGTGATACCTCTACCTATGAAGATATCTCTGGTTTTTATCGTGAG
GTAGAACTTCAGGGTTACAAGATCGATTGGACGTACATTTCCGAGAAAGACATTGATCTTTTACAAGAGAAGGGTCAGCTTTAC
TTATTTCAGATCTACAATAAAGACTTTTCGAAAAAATCCACGGGCAACGACAACCTTCATACAATGTACTTAAAGAACCTGTTC
TCTGAAGAAAACTTGAAAGATATCGTGCTTAAATTGAATGGCGAGGCCGAGATTTTTTTCCGTAAAAGCTCGATTAAGAATCCC
ATCATCCACAAGAAAGGCAGCATTCTGGTAAATCGTACCTATGAAGCGGAGGAAAAGGACCAATTTGGTAATATTCAGATTGTC
CGTAAGAACATCCCTGAAAATATCTATCAAGAATTATATAAATATTTCAACGATAAGTCGGACAAGGAACTTAGCGATGAAGCC
GCGAAGTTGAAAAATGTTGTTGGTCACCACGAAGCAGCAACAAACATTGTGAAAGACTATCGCTACACTTACGATAAGTACTTT
TTACATATGCCTATTACGATTAACTTTAAGGCAAATAAGACAGGTTTTATCAACGACCGTATCCTGCAATATATTGCAAAAGAG
AAGGACCTGCATGTCATTGGGATTGATCGCGGTGAACGCAATCTGATTTACGTGAGTGTTATTGATACCTGCGGTAATATTGTT
GAGCAAAAGTCTTTTAATATCGTTAATGGTTACGACTACCAAATTAAGCTTAAACAACAGGAAGGTGCCCGCCAGATCGCCCGT
AAGGAGTGGAAGGAAATCGGAAAAATTAAGGAAATCAAAGAGGGATATCTGAGCTTGGTTATTCATGAAATCTCAAAGATGGTT
ATTAAGTACAACGCCATCATCGCTATGGAAGACTTATCGTATGGGTTTAAAAAGGGTCGTTTCAAAGTTGAGCGCCAGGTCTAC
CAAAAGTTTGAAACGATGCTTATTAATAAATTAAACTACTTGGTTTTCAAAGATATCTCTATTACCGAGAATGGAGGTTTACTG
AAAGGATACCAGTTAACGTATATCCCCGATAAGCTTAAAAACGTGGGCCATCAGTGTGGCTGTATTTTCTATGTGCCCGCGGCA
TATACATCAAAAATTGACCCGACGACGGGTTTCGTTAATATCTTCAAGTTCAAAGATCTGACAGTTGATGCAAAACGCGAATTC
ATTAAGAAGTTCGATAGTATTCGCTATGACTCCGAGAAAAATTTGTTTTGCTTCACTTTTGACTACAATAACTTTATTACTCAG
AATACAGTCATGAGTAAAAGCTCCTGGTCGGTTTACACGTACGGGGTACGCATCAAACGTCGTTTTGTGAATGGTCGTTTTAGT
AATGAGTCGGATACAATTGATATTACCAAGGATATGGAGAAGACTCTGGAAATGACAGACATCAATTGGCGTGATGGACATGAT
TTGCGTCAGGACATTATCGACTATGAGATTGTGCAGCATATTTTCGAAATTTTTCGCCTGACGGTGCAAATGCGTAATTCCTTA
AGCGAACTGGAAGATCGCGACTATGACCGCTTAATTTCTCCTGTGCTGAATGAGAACAACATCTTCTATGACTCAGCGAAAGCC
GGGGACGCTTTGCCAAAGGATGCAGATGCTAACGGTGCATATTGTATTGCTCTGAAAGGCCTTTACGAGATCAAACAAATTACT
GAAAACTGGAAGGAAGATGGAAAGTTTTCCCGTGATAAATTGAAGATCTCTAATAAGGACTGGTTTGACTTTATCCAAAATAAA
CGTTATTTA
ErCas12a-S514P-AA (SEQ ID NO: 86)
MNNGTNNFQNFIGISSLQKTLRNALIPTETTQQFIVKNGIIKEDELRGENRQILKDIMDDYYRGFISETLSSIDDIDWTSLFEK
MEIQLKNGDNKDTLIKEQTEYRKAIHKKFANDDRFKNMFSAKLISDILPEFVIHNNNYSASEKEEKTQVIKLESRFATSFKDYF
KNRANCFSADDISSSSCHRIVNDNAEIFFSNALVYRRIVKSLSNDDINKISGDMKDSLKEMSLEEIYSYEKYGEFITQEGISFY
NDICGKVNSFMNLYCQKNKENKNLYKLQKLHKQILCIADTSYEVPYKFESDEEVYQSVNGELDNISSKHIVERLRKIGDNYNGY
NLDKIYIVSKFYESVSQKTYRDWETINTALEIHYNNILPGNGKSKADKVKKAVKNDLQKSITEINELVSNYKLCSDDNIKAETY
IHEISHILNNFEAQELKYNPEIHLVESELKASELKNVLDVIMNAFHWCSVFMTEELVDKDNNFYAELEEIYDEIYPVISLYNLV
RNYVTQKPYPTKKIKLNFGIPTLADGWSKSKEYSNNAIILMRDNLYYLGIFNAKNKPDKKIIEGNTSENKGDYKKMIYNLLPGP
NKMIPKVFLSSKTGVETYKPSAYILEGYKQNKHIKSSKDFDITFCHDLIDYFKNCIAIHPEWKNFGFDFSDTSTYEDISGFYRE
VELQGYKIDWTYISEKDIDLLQEKGQLYLFQIYNKDFSKKSTGNDNLHTMYLKNLFSEENLKDIVLKLNGEAEIFFRKSSIKNP
IIHKKGSILVNRTYEAEEKDQFGNIQIVRKNIPENIYQELYKYFNDKSDKELSDEAAKLKNVVGHHEAATNIVKDYRYTYDKYF
LHMPITINFKANKTGFINDRILQYIAKEKDLHVIGIDRGERNLIYVSVIDTCGNIVEQKSFNIVNGYDYQIKLKQQEGARQIAR
KEWKEIGKIKEIKEGYLSLVIHEISKMVIKYNAIIAMEDLSYGFKKGRFKVERQVYQKFETMLINKLNYLVFKDISITENGGLL
KGYQLTYIPDKLKNVGHQCGCIFYVPAAYTSKIDPTTGFVNIFKFKDLTVDAKREFIKKFDSIRYDSEKNLFCFTEDYNNFITQ
NTVMSKSSWSVYTYGVRIKRRFVNGRFSNESDTIDITKDMEKTLEMTDINWRDGHDLRQDIIDYEIVQHIFEIFRLTVQMRNSL
SELEDRDYDRLISPVLNENNIFYDSAKAGDALPKDADANGAYCIALKGLYEIKQITENWKEDGKFSRDKLKISNKDWFDFIQNK
RYL
ErCas12a-T515P-NT (SEQ ID NO: 87)
atgAATAACGGTACCAATAACTTTCAAAATTTTATCGGGATCTCCTCGTTGCAAAAAACTCTTCGTAATGCTTTAATCCCGACT
GAGACAACACAGCAGTTCATCGTTAAAAACGGCATCATTAAAGAAGATGAGCTGCGCGGCGAGAACCGTCAGATTTTAAAGGAC
ATCATGGACGACTATTACCGTGGGTTCATCTCAGAAACATTAAGCAGCATCGATGATATCGACTGGACCTCACTGTTTGAGAAG
ATGGAGATTCAACTTAAGAATGGAGACAACAAAGACACTTTAATTAAGGAGCAGACGGAATATCGTAAAGCTATCCATAAAAAA
TTTGCAAACGATGACCGTTTCAAAAATATGTTTTCCGCAAAATTGATTAGCGACATTTTACCTGAATTCGTAATCCATAACAAC
AACTATTCCGCATCTGAAAAAGAGGAGAAGACCCAAGTTATCAAACTTTTTTCACGTTTCGCGACATCTTTTAAAGACTACTTT
AAGAATCGTGCGAATTGTTTCAGTGCAGATGATATTTCGTCTAGTTCATGTCACCGTATCGTGAATGACAACGCTGAGATTTTC
TTTTCTAATGCGTTGGTGTATCGCCGCATCGTAAAGTCCTTGTCGAATGATGATATCAACAAAATTAGTGGTGACATGAAAGAC
TCCCTGAAAGAAATGTCATTAGAGGAGATTTACAGCTACGAAAAATACGGAGAGTTCATCACTCAGGAAGGTATCTCCTTTTAC
AACGATATTTGCGGCAAAGTTAATAGTTTCATGAATCTGTATTGTCAGAAGAATAAGGAAAACAAGAATCTGTACAAGTTACAA
AAGCTTCATAAACAGATCTTGTGCATCGCCGACACGTCTTATGAAGTCCCGTATAAATTTGAAAGCGACGAAGAAGTATATCAG
AGTGTGAATGGATTCTTGGACAATATCTCATCAAAACACATTGTTGAACGTTTGCGCAAAATCGGCGACAACTATAACGGATAC
AACTTGGATAAAATTTATATCGTATCAAAATTTTATGAATCAGTATCCCAAAAGACTTACCGTGATTGGGAGACTATTAATACG
GCGTTAGAAATCCATTACAACAACATTCTGCCGGGTAACGGTAAATCGAAAGCGGACAAAGTGAAGAAGGCGGTTAAGAACGAT
CTTCAGAAGTCTATCACGGAGATTAATGAGCTGGTTTCCAATTACAAGTTGTGCTCGGATGATAACATCAAAGCTGAAACCTAT
ATCCATGAAATTTCTCATATTCTTAATAACTTCGAGGCACAAGAATTAAAATATAACCCAGAAATTCATCTGGTTGAGAGCGAA
CTTAAAGCTTCAGAATTAAAAAATGTTTTGGACGTAATTATGAACGCCTTCCATTGGTGCAGCGTGTTTATGACAGAGGAGTTA
GTAGATAAGGATAACAACTTTTATGCAGAATTGGAAGAGATCTATGATGAGATCTATCCAGTGATTTCACTGTATAACTTAGTC
CGTAATTACGTCACTCAGAAGCCGTACTCACCGAAAAAGATCAAGTTAAATTTTGGAATTCCGACATTGGCGGATGGTTGGAGT
AAGTCTAAGGAATACTCAAATAACGCTATTATCTTAATGCGTGACAACCTGTATTACTTGGGTATTTTCAATGCCAAAAATAAG
CCCGATAAAAAAATCATTGAAGGGAATACTTCAGAAAATAAGGGAGATTACAAAAAAATGATTTATAACCTTTTGCCAGGCCCA
AACAAAATGATCCCCAAGGTGTTTTTGAGTAGTAAGACGGGAGTAGAAACATATAAGCCATCAGCGTACATTCTTGAAGGGTAC
AAACAAAATAAACACATCAAGAGCAGCAAGGACTTTGACATTACATTTTGTCATGACTTAATCGACTACTTTAAAAATTGCATT
GCCATTCACCCTGAGTGGAAAAATTTTGGTTTCGACTTCAGTGATACCTCTACCTATGAAGATATCTCTGGTTTTTATCGTGAG
GTAGAACTTCAGGGTTACAAGATCGATTGGACGTACATTTCCGAGAAAGACATTGATCTTTTACAAGAGAAGGGTCAGCTTTAC
TTATTTCAGATCTACAATAAAGACTTTTCGAAAAAATCCACGGGCAACGACAACCTTCATACAATGTACTTAAAGAACCTGTTC
TCTGAAGAAAACTTGAAAGATATCGTGCTTAAATTGAATGGCGAGGCCGAGATTTTTTTCCGTAAAAGCTCGATTAAGAATCCC
ATCATCCACAAGAAAGGCAGCATTCTGGTAAATCGTACCTATGAAGCGGAGGAAAAGGACCAATTTGGTAATATTCAGATTGTC
CGTAAGAACATCCCTGAAAATATCTATCAAGAATTATATAAATATTTCAACGATAAGTCGGACAAGGAACTTAGCGATGAAGCC
GCGAAGTTGAAAAATGTTGTTGGTCACCACGAAGCAGCAACAAACATTGTGAAAGACTATCGCTACACTTACGATAAGTACTTT
TTACATATGCCTATTACGATTAACTTTAAGGCAAATAAGACAGGTTTTATCAACGACCGTATCCTGCAATATATTGCAAAAGAG
AAGGACCTGCATGTCATTGGGATTGATCGCGGTGAACGCAATCTGATTTACGTGAGTGTTATTGATACCTGCGGTAATATTGTT
GAGCAAAAGTCTTTTAATATCGTTAATGGTTACGACTACCAAATTAAGCTTAAACAACAGGAAGGTGCCCGCCAGATCGCCCGT
AAGGAGTGGAAGGAAATCGGAAAAATTAAGGAAATCAAAGAGGGATATCTGAGCTTGGTTATTCATGAAATCTCAAAGATGGTT
ATTAAGTACAACGCCATCATCGCTATGGAAGACTTATCGTATGGGTTTAAAAAGGGTCGTTTCAAAGTTGAGCGCCAGGTCTAC
CAAAAGTTTGAAACGATGCTTATTAATAAATTAAACTACTTGGTTTTCAAAGATATCTCTATTACCGAGAATGGAGGTTTACTG
AAAGGATACCAGTTAACGTATATCCCCGATAAGCTTAAAAACGTGGGCCATCAGTGTGGCTGTATTTTCTATGTGCCCGCGGCA
TATACATCAAAAATTGACCCGACGACGGGTTTCGTTAATATCTTCAAGTTCAAAGATCTGACAGTTGATGCAAAACGCGAATTC
ATTAAGAAGTTCGATAGTATTCGCTATGACTCCGAGAAAAATTTGTTTTGCTTCACTTTTGACTACAATAACTTTATTACTCAG
AATACAGTCATGAGTAAAAGCTCCTGGTCGGTTTACACGTACGGGGTACGCATCAAACGTCGTTTTGTGAATGGTCGTTTTAGT
AATGAGTCGGATACAATTGATATTACCAAGGATATGGAGAAGACTCTGGAAATGACAGACATCAATTGGCGTGATGGACATGAT
TTGCGTCAGGACATTATCGACTATGAGATTGTGCAGCATATTTTCGAAATTTTTCGCCTGACGGTGCAAATGCGTAATTCCTTA
AGCGAACTGGAAGATCGCGACTATGACCGCTTAATTTCTCCTGTGCTGAATGAGAACAACATCTTCTATGACTCAGCGAAAGCC
GGGGACGCTTTGCCAAAGGATGCAGATGCTAACGGTGCATATTGTATTGCTCTGAAAGGCCTTTACGAGATCAAACAAATTACT
GAAAACTGGAAGGAAGATGGAAAGTTTTCCCGTGATAAATTGAAGATCTCTAATAAGGACTGGTTTGACTTTATCCAAAATAAA
CGTTATTTA
ErCas12a-T515P-AA (SEQ ID NO: 88)
MNNGTNNFQNFIGISSLQKTLRNALIPTETTQQFIVKNGIIKEDELRGENRQILKDIMDDYYRGFISETLSSIDDIDWTSLFEK
MEIQLKNGDNKDTLIKEQTEYRKAIHKKFANDDRFKNMFSAKLISDILPEFVIHNNNYSASEKEEKTQVIKLFSRFATSFKDYF
KNRANCFSADDISSSSCHRIVNDNAEIFFSNALVYRRIVKSLSNDDINKISGDMKDSLKEMSLEEIYSYEKYGEFITQEGISFY
NDICGKVNSFMNLYCQKNKENKNLYKLQKLHKQILCIADTSYEVPYKFESDEEVYQSVNGELDNISSKHIVERLRKIGDNYNGY
NLDKIYIVSKFYESVSQKTYRDWETINTALEIHYNNILPGNGKSKADKVKKAVKNDLQKSITEINELVSNYKLCSDDNIKAETY
IHEISHILNNFEAQELKYNPEIHLVESELKASELKNVLDVIMNAFHWCSVFMTEELVDKDNNFYAELEEIYDEIYPVISLYNLV
RNYVTQKPYSPKKIKLNFGIPTLADGWSKSKEYSNNAIILMRDNLYYLGIFNAKNKPDKKIIEGNTSENKGDYKKMIYNLLPGP
NKMIPKVFLSSKTGVETYKPSAYILEGYKQNKHIKSSKDFDITFCHDLIDYFKNCIAIHPEWKNFGFDFSDTSTYEDISGFYRE
VELQGYKIDWTYISEKDIDLLQEKGQLYLFQIYNKDFSKKSTGNDNLHTMYLKNLFSEENLKDIVLKLNGEAEIFFRKSSIKNP
IIHKKGSILVNRTYEAEEKDQFGNIQIVRKNIPENIYQELYKYFNDKSDKELSDEAAKLKNVVGHHEAATNIVKDYRYTYDKYF
LHMPITINFKANKTGFINDRILQYIAKEKDLHVIGIDRGERNLIYVSVIDTCGNIVEQKSFNIVNGYDYQIKLKQQEGARQIAR
KEWKEIGKIKEIKEGYLSLVIHEISKMVIKYNAIIAMEDLSYGFKKGRFKVERQVYQKFETMLINKLNYLVFKDISITENGGLL
KGYQLTYIPDKLKNVGHQCGCIFYVPAAYTSKIDPTTGFVNIFKFKDLTVDAKREFIKKFDSIRYDSEKNLFCFTEDYNNFITQ
NTVMSKSSWSVYTYGVRIKRRFVNGRFSNESDTIDITKDMEKTLEMTDINWRDGHDLRQDIIDYEIVQHIFEIFRLTVQMRNSL
SELEDRDYDRLISPVLNENNIFYDSAKAGDALPKDADANGAYCIALKGLYEIKQITENWKEDGKFSRDKLKISNKDWFDFIQNK
RYL
ErCas12a-K516R-NT (SEQ ID NO: 89)
atgAATAACGGTACCAATAACTTTCAAAATTTTATCGGGATCTCCTCGTTGCAAAAAACTCTTCGTAATGCTTTAATCCCGACT
GAGACAACACAGCAGTTCATCGTTAAAAACGGCATCATTAAAGAAGATGAGCTGCGCGGCGAGAACCGTCAGATTTTAAAGGAC
ATCATGGACGACTATTACCGTGGGTTCATCTCAGAAACATTAAGCAGCATCGATGATATCGACTGGACCTCACTGTTTGAGAAG
ATGGAGATTCAACTTAAGAATGGAGACAACAAAGACACTTTAATTAAGGAGCAGACGGAATATCGTAAAGCTATCCATAAAAAA
TTTGCAAACGATGACCGTTTCAAAAATATGTTTTCCGCAAAATTGATTAGCGACATTTTACCTGAATTCGTAATCCATAACAAC
AACTATTCCGCATCTGAAAAAGAGGAGAAGACCCAAGTTATCAAACTTTTTTCACGTTTCGCGACATCTTTTAAAGACTACTTT
AAGAATCGTGCGAATTGTTTCAGTGCAGATGATATTTCGTCTAGTTCATGTCACCGTATCGTGAATGACAACGCTGAGATTTTC
TTTTCTAATGCGTTGGTGTATCGCCGCATCGTAAAGTCCTTGTCGAATGATGATATCAACAAAATTAGTGGTGACATGAAAGAC
TCCCTGAAAGAAATGTCATTAGAGGAGATTTACAGCTACGAAAAATACGGAGAGTTCATCACTCAGGAAGGTATCTCCTTTTAC
AACGATATTTGCGGCAAAGTTAATAGTTTCATGAATCTGTATTGTCAGAAGAATAAGGAAAACAAGAATCTGTACAAGTTACAA
AAGCTTCATAAACAGATCTTGTGCATCGCCGACACGTCTTATGAAGTCCCGTATAAATTTGAAAGCGACGAAGAAGTATATCAG
AGTGTGAATGGATTCTTGGACAATATCTCATCAAAACACATTGTTGAACGTTTGCGCAAAATCGGCGACAACTATAACGGATAC
AACTTGGATAAAATTTATATCGTATCAAAATTTTATGAATCAGTATCCCAAAAGACTTACCGTGATTGGGAGACTATTAATACG
GCGTTAGAAATCCATTACAACAACATTCTGCCGGGTAACGGTAAATCGAAAGCGGACAAAGTGAAGAAGGCGGTTAAGAACGAT
CTTCAGAAGTCTATCACGGAGATTAATGAGCTGGTTTCCAATTACAAGTTGTGCTCGGATGATAACATCAAAGCTGAAACCTAT
ATCCATGAAATTTCTCATATTCTTAATAACTTCGAGGCACAAGAATTAAAATATAACCCAGAAATTCATCTGGTTGAGAGCGAA
CTTAAAGCTTCAGAATTAAAAAATGTTTTGGACGTAATTATGAACGCCTTCCATTGGTGCAGCGTGTTTATGACAGAGGAGTTA
GTAGATAAGGATAACAACTTTTATGCAGAATTGGAAGAGATCTATGATGAGATCTATCCAGTGATTTCACTGTATAACTTAGTC
CGTAATTACGTCACTCAGAAGCCGTACTCAACTCGTAAGATCAAGTTAAATTTTGGAATTCCGACATTGGCGGATGGTTGGAGT
AAGTCTAAGGAATACTCAAATAACGCTATTATCTTAATGCGTGACAACCTGTATTACTTGGGTATTTTCAATGCCAAAAATAAG
CCCGATAAAAAAATCATTGAAGGGAATACTTCAGAAAATAAGGGAGATTACAAAAAAATGATTTATAACCTTTTGCCAGGCCCA
AACAAAATGATCCCCAAGGTGTTTTTGAGTAGTAAGACGGGAGTAGAAACATATAAGCCATCAGCGTACATTCTTGAAGGGTAC
AAACAAAATAAACACATCAAGAGCAGCAAGGACTTTGACATTACATTTTGTCATGACTTAATCGACTACTTTAAAAATTGCATT
GCCATTCACCCTGAGTGGAAAAATTTTGGTTTCGACTTCAGTGATACCTCTACCTATGAAGATATCTCTGGTTTTTATCGTGAG
GTAGAACTTCAGGGTTACAAGATCGATTGGACGTACATTTCCGAGAAAGACATTGATCTTTTACAAGAGAAGGGTCAGCTTTAC
TTATTTCAGATCTACAATAAAGACTTTTCGAAAAAATCCACGGGCAACGACAACCTTCATACAATGTACTTAAAGAACCTGTTC
TCTGAAGAAAACTTGAAAGATATCGTGCTTAAATTGAATGGCGAGGCCGAGATTTTTTTCCGTAAAAGCTCGATTAAGAATCCC
ATCATCCACAAGAAAGGCAGCATTCTGGTAAATCGTACCTATGAAGCGGAGGAAAAGGACCAATTTGGTAATATTCAGATTGTC
CGTAAGAACATCCCTGAAAATATCTATCAAGAATTATATAAATATTTCAACGATAAGTCGGACAAGGAACTTAGCGATGAAGCC
GCGAAGTTGAAAAATGTTGTTGGTCACCACGAAGCAGCAACAAACATTGTGAAAGACTATCGCTACACTTACGATAAGTACTTT
TTACATATGCCTATTACGATTAACTTTAAGGCAAATAAGACAGGTTTTATCAACGACCGTATCCTGCAATATATTGCAAAAGAG
AAGGACCTGCATGTCATTGGGATTGATCGCGGTGAACGCAATCTGATTTACGTGAGTGTTATTGATACCTGCGGTAATATTGTT
GAGCAAAAGTCTTTTAATATCGTTAATGGTTACGACTACCAAATTAAGCTTAAACAACAGGAAGGTGCCCGCCAGATCGCCCGT
AAGGAGTGGAAGGAAATCGGAAAAATTAAGGAAATCAAAGAGGGATATCTGAGCTTGGTTATTCATGAAATCTCAAAGATGGTT
ATTAAGTACAACGCCATCATCGCTATGGAAGACTTATCGTATGGGTTTAAAAAGGGTCGTTTCAAAGTTGAGCGCCAGGTCTAC
CAAAAGTTTGAAACGATGCTTATTAATAAATTAAACTACTTGGTTTTCAAAGATATCTCTATTACCGAGAATGGAGGTTTACTG
AAAGGATACCAGTTAACGTATATCCCCGATAAGCTTAAAAACGTGGGCCATCAGTGTGGCTGTATTTTCTATGTGCCCGCGGCA
TATACATCAAAAATTGACCCGACGACGGGTTTCGTTAATATCTTCAAGTTCAAAGATCTGACAGTTGATGCAAAACGCGAATTC
ATTAAGAAGTTCGATAGTATTCGCTATGACTCCGAGAAAAATTTGTTTTGCTTCACTTTTGACTACAATAACTTTATTACTCAG
AATACAGTCATGAGTAAAAGCTCCTGGTCGGTTTACACGTACGGGGTACGCATCAAACGTCGTTTTGTGAATGGTCGTTTTAGT
AATGAGTCGGATACAATTGATATTACCAAGGATATGGAGAAGACTCTGGAAATGACAGACATCAATTGGCGTGATGGACATGAT
TTGCGTCAGGACATTATCGACTATGAGATTGTGCAGCATATTTTCGAAATTTTTCGCCTGACGGTGCAAATGCGTAATTCCTTA
AGCGAACTGGAAGATCGCGACTATGACCGCTTAATTTCTCCTGTGCTGAATGAGAACAACATCTTCTATGACTCAGCGAAAGCC
GGGGACGCTTTGCCAAAGGATGCAGATGCTAACGGTGCATATTGTATTGCTCTGAAAGGCCTTTACGAGATCAAACAAATTACT
GAAAACTGGAAGGAAGATGGAAAGTTTTCCCGTGATAAATTGAAGATCTCTAATAAGGACTGGTTTGACTTTATCCAAAATAAA
CGTTATTTA
ErCas12a-K516R-AA (SEQ ID NO: 90)
MNNGTNNFQNFIGISSLQKTLRNALIPTETTQQFIVKNGIIKEDELRGENRQILKDIMDDYYRGFISETLSSIDDIDWTSLFEK
MEIQLKNGDNKDTLIKEQTEYRKAIHKKFANDDRFKNMFSAKLISDILPEFVIHNNNYSASEKEEKTQVIKLFSRFATSFKDYF
KNRANCFSADDISSSSCHRIVNDNAEIFFSNALVYRRIVKSLSNDDINKISGDMKDSLKEMSLEEIYSYEKYGEFITQEGISFY
NDICGKVNSFMNLYCQKNKENKNLYKLQKLHKQILCIADTSYEVPYKFESDEEVYQSVNGELDNISSKHIVERLRKIGDNYNGY
NLDKIYIVSKFYESVSQKTYRDWETINTALEIHYNNILPGNGKSKADKVKKAVKNDLQKSITEINELVSNYKLCSDDNIKAETY
IHEISHILNNFEAQELKYNPEIHLVESELKASELKNVLDVIMNAFHWCSVFMTEELVDKDNNFYAELEEIYDEIYPVISLYNLV
RNYVTQKPYSTRKIKLNFGIPTLADGWSKSKEYSNNAIILMRDNLYYLGIFNAKNKPDKKIIEGNTSENKGDYKKMIYNLLPGP
NKMIPKVFLSSKTGVETYKPSAYILEGYKQNKHIKSSKDFDITFCHDLIDYFKNCIAIHPEWKNFGFDFSDTSTYEDISGFYRE
VELQGYKIDWTYISEKDIDLLQEKGQLYLFQIYNKDFSKKSTGNDNLHTMYLKNLFSEENLKDIVLKLNGEAEIFFRKSSIKNP
IIHKKGSILVNRTYEAEEKDQFGNIQIVRKNIPENIYQELYKYFNDKSDKELSDEAAKLKNVVGHHEAATNIVKDYRYTYDKYF
LHMPITINFKANKTGFINDRILQYIAKEKDLHVIGIDRGERNLIYVSVIDTCGNIVEQKSFNIVNGYDYQIKLKQQEGARQIAR
KEWKEIGKIKEIKEGYLSLVIHEISKMVIKYNAIIAMEDLSYGFKKGRFKVERQVYQKFETMLINKLNYLVFKDISITENGGLL
KGYQLTYIPDKLKNVGHQCGCIFYVPAAYTSKIDPTTGFVNIFKFKDLTVDAKREFIKKFDSIRYDSEKNLFCFTFDYNNFITQ
NTVMSKSSWSVYTYGVRIKRRFVNGRFSNESDTIDITKDMEKTLEMTDINWRDGHDLRQDIIDYEIVQHIFEIFRLTVQMRNSL
SELEDRDYDRLISPVLNENNIFYDSAKAGDALPKDADANGAYCIALKGLYEIKQITENWKEDGKFSRDKLKISNKDWEDFIQNK
RYL
ErCas12a-K516P-NT (SEQ ID NO: 91)
atgAATAACGGTACCAATAACTTTCAAAATTTTATCGGGATCTCCTCGTTGCAAAAAACTCTTCGTAATGCTTTAATCCCGACT
GAGACAACACAGCAGTTCATCGTTAAAAACGGCATCATTAAAGAAGATGAGCTGCGCGGCGAGAACCGTCAGATTTTAAAGGAC
ATCATGGACGACTATTACCGTGGGTTCATCTCAGAAACATTAAGCAGCATCGATGATATCGACTGGACCTCACTGTTTGAGAAG
ATGGAGATTCAACTTAAGAATGGAGACAACAAAGACACTTTAATTAAGGAGCAGACGGAATATCGTAAAGCTATCCATAAAAAA
TTTGCAAACGATGACCGTTTCAAAAATATGTTTTCCGCAAAATTGATTAGCGACATTTTACCTGAATTCGTAATCCATAACAAC
AACTATTCCGCATCTGAAAAAGAGGAGAAGACCCAAGTTATCAAACTTTTTTCACGTTTCGCGACATCTTTTAAAGACTACTTT
AAGAATCGTGCGAATTGTTTCAGTGCAGATGATATTTCGTCTAGTTCATGTCACCGTATCGTGAATGACAACGCTGAGATTTTC
TTTTCTAATGCGTTGGTGTATCGCCGCATCGTAAAGTCCTTGTCGAATGATGATATCAACAAAATTAGTGGTGACATGAAAGAC
TCCCTGAAAGAAATGTCATTAGAGGAGATTTACAGCTACGAAAAATACGGAGAGTTCATCACTCAGGAAGGTATCTCCTTTTAC
AACGATATTTGCGGCAAAGTTAATAGTTTCATGAATCTGTATTGTCAGAAGAATAAGGAAAACAAGAATCTGTACAAGTTACAA
AAGCTTCATAAACAGATCTTGTGCATCGCCGACACGTCTTATGAAGTCCCGTATAAATTTGAAAGCGACGAAGAAGTATATCAG
AGTGTGAATGGATTCTTGGACAATATCTCATCAAAACACATTGTTGAACGTTTGCGCAAAATCGGCGACAACTATAACGGATAC
AACTTGGATAAAATTTATATCGTATCAAAATTTTATGAATCAGTATCCCAAAAGACTTACCGTGATTGGGAGACTATTAATACG
GCGTTAGAAATCCATTACAACAACATTCTGCCGGGTAACGGTAAATCGAAAGCGGACAAAGTGAAGAAGGCGGTTAAGAACGAT
CTTCAGAAGTCTATCACGGAGATTAATGAGCTGGTTTCCAATTACAAGTTGTGCTCGGATGATAACATCAAAGCTGAAACCTAT
ATCCATGAAATTTCTCATATTCTTAATAACTTCGAGGCACAAGAATTAAAATATAACCCAGAAATTCATCTGGTTGAGAGCGAA
CTTAAAGCTTCAGAATTAAAAAATGTTTTGGACGTAATTATGAACGCCTTCCATTGGTGCAGCGTGTTTATGACAGAGGAGTTA
GTAGATAAGGATAACAACTTTTATGCAGAATTGGAAGAGATCTATGATGAGATCTATCCAGTGATTTCACTGTATAACTTAGTC
CGTAATTACGTCACTCAGAAGCCGTACTCAACTCCGAAGATCAAGTTAAATTTTGGAATTCCGACATTGGCGGATGGTTGGAGT
AAGTCTAAGGAATACTCAAATAACGCTATTATCTTAATGCGTGACAACCTGTATTACTTGGGTATTTTCAATGCCAAAAATAAG
CCCGATAAAAAAATCATTGAAGGGAATACTTCAGAAAATAAGGGAGATTACAAAAAAATGATTTATAACCTTTTGCCAGGCCCA
AACAAAATGATCCCCAAGGTGTTTTTGAGTAGTAAGACGGGAGTAGAAACATATAAGCCATCAGCGTACATTCTTGAAGGGTAC
AAACAAAATAAACACATCAAGAGCAGCAAGGACTTTGACATTACATTTTGTCATGACTTAATCGACTACTTTAAAAATTGCATT
GCCATTCACCCTGAGTGGAAAAATTTTGGTTTCGACTTCAGTGATACCTCTACCTATGAAGATATCTCTGGTTTTTATCGTGAG
GTAGAACTTCAGGGTTACAAGATCGATTGGACGTACATTTCCGAGAAAGACATTGATCTTTTACAAGAGAAGGGTCAGCTTTAC
TTATTTCAGATCTACAATAAAGACTTTTCGAAAAAATCCACGGGCAACGACAACCTTCATACAATGTACTTAAAGAACCTGTTC
TCTGAAGAAAACTTGAAAGATATCGTGCTTAAATTGAATGGCGAGGCCGAGATTTTTTTCCGTAAAAGCTCGATTAAGAATCCC
ATCATCCACAAGAAAGGCAGCATTCTGGTAAATCGTACCTATGAAGCGGAGGAAAAGGACCAATTTGGTAATATTCAGATTGTC
CGTAAGAACATCCCTGAAAATATCTATCAAGAATTATATAAATATTTCAACGATAAGTCGGACAAGGAACTTAGCGATGAAGCC
GCGAAGTTGAAAAATGTTGTTGGTCACCACGAAGCAGCAACAAACATTGTGAAAGACTATCGCTACACTTACGATAAGTACTTT
TTACATATGCCTATTACGATTAACTTTAAGGCAAATAAGACAGGTTTTATCAACGACCGTATCCTGCAATATATTGCAAAAGAG
AAGGACCTGCATGTCATTGGGATTGATCGCGGTGAACGCAATCTGATTTACGTGAGTGTTATTGATACCTGCGGTAATATTGTT
GAGCAAAAGTCTTTTAATATCGTTAATGGTTACGACTACCAAATTAAGCTTAAACAACAGGAAGGTGCCCGCCAGATCGCCCGT
AAGGAGTGGAAGGAAATCGGAAAAATTAAGGAAATCAAAGAGGGATATCTGAGCTTGGTTATTCATGAAATCTCAAAGATGGTT
ATTAAGTACAACGCCATCATCGCTATGGAAGACTTATCGTATGGGTTTAAAAAGGGTCGTTTCAAAGTTGAGCGCCAGGTCTAC
CAAAAGTTTGAAACGATGCTTATTAATAAATTAAACTACTTGGTTTTCAAAGATATCTCTATTACCGAGAATGGAGGTTTACTG
AAAGGATACCAGTTAACGTATATCCCCGATAAGCTTAAAAACGTGGGCCATCAGTGTGGCTGTATTTTCTATGTGCCCGCGGCA
TATACATCAAAAATTGACCCGACGACGGGTTTCGTTAATATCTTCAAGTTCAAAGATCTGACAGTTGATGCAAAACGCGAATTC
ATTAAGAAGTTCGATAGTATTCGCTATGACTCCGAGAAAAATTTGTTTTGCTTCACTTTTGACTACAATAACTTTATTACTCAG
AATACAGTCATGAGTAAAAGCTCCTGGTCGGTTTACACGTACGGGGTACGCATCAAACGTCGTTTTGTGAATGGTCGTTTTAGT
AATGAGTCGGATACAATTGATATTACCAAGGATATGGAGAAGACTCTGGAAATGACAGACATCAATTGGCGTGATGGACATGAT
TTGCGTCAGGACATTATCGACTATGAGATTGTGCAGCATATTTTCGAAATTTTTCGCCTGACGGTGCAAATGCGTAATTCCTTA
AGCGAACTGGAAGATCGCGACTATGACCGCTTAATTTCTCCTGTGCTGAATGAGAACAACATCTTCTATGACTCAGCGAAAGCC
GGGGACGCTTTGCCAAAGGATGCAGATGCTAACGGTGCATATTGTATTGCTCTGAAAGGCCTTTACGAGATCAAACAAATTACT
GAAAACTGGAAGGAAGATGGAAAGTTTTCCCGTGATAAATTGAAGATCTCTAATAAGGACTGGTTTGACTTTATCCAAAATAAA
CGTTATTTA
ErCas12a-K516P-AA (SEQ ID NO: 92)
MNNGTNNFQNFIGISSLQKTLRNALIPTETTQQFIVKNGIIKEDELRGENRQILKDIMDDYYRGFISETLSSIDDIDWTSLFEK
MEIQLKNGDNKDTLIKEQTEYRKAIHKKFANDDRFKNMFSAKLISDILPEFVIHNNNYSASEKEEKTQVIKLFSRFATSFKDYF
KNRANCFSADDISSSSCHRIVNDNAEIFFSNALVYRRIVKSLSNDDINKISGDMKDSLKEMSLEEIYSYEKYGEFITQEGISFY
NDICGKVNSFMNLYCQKNKENKNLYKLQKLHKQILCIADTSYEVPYKFESDEEVYQSVNGELDNISSKHIVERLRKIGDNYNGY
NLDKIYIVSKFYESVSQKTYRDWETINTALEIHYNNILPGNGKSKADKVKKAVKNDLQKSITEINELVSNYKLCSDDNIKAETY
IHEISHILNNFEAQELKYNPEIHLVESELKASELKNVLDVIMNAFHWCSVFMTEELVDKDNNFYAELEEIYDEIYPVISLYNLV
RNYVTQKPYSTPKIKLNFGIPTLADGWSKSKEYSNNAIILMRDNLYYLGIFNAKNKPDKKIIEGNTSENKGDYKKMIYNLLPGP
NKMIPKVFLSSKTGVETYKPSAYILEGYKQNKHIKSSKDFDITFCHDLIDYFKNCIAIHPEWKNFGFDFSDTSTYEDISGFYRE
VELQGYKIDWTYISEKDIDLLQEKGQLYLFQIYNKDFSKKSTGNDNLHTMYLKNLFSEENLKDIVLKLNGEAEIFFRKSSIKNP
IIHKKGSILVNRTYEAEEKDQFGNIQIVRKNIPENIYQELYKYFNDKSDKELSDEAAKLKNVVGHHEAATNIVKDYRYTYDKYF
LHMPITINFKANKTGFINDRILQYIAKEKDLHVIGIDRGERNLIYVSVIDTCGNIVEQKSFNIVNGYDYQIKLKQQEGARQIAR
KEWKEIGKIKEIKEGYLSLVIHEISKMVIKYNAIIAMEDLSYGFKKGRFKVERQVYQKFETMLINKLNYLVFKDISITENGGLL
KGYQLTYIPDKLKNVGHQCGCIFYVPAAYTSKIDPTTGFVNIFKFKDLTVDAKREFIKKFDSIRYDSEKNLFCFTEDYNNFITQ
NTVMSKSSWSVYTYGVRIKRRFVNGRFSNESDTIDITKDMEKTLEMTDINWRDGHDLRQDIIDYEIVQHIFEIFRLTVQMRNSL
SELEDRDYDRLISPVLNENNIFYDSAKAGDALPKDADANGAYCIALKGLYEIKQITENWKEDGKFSRDKLKISNKDWFDFIQNK
RYL
ErCas12a-K517P-NT (SEQ ID NO: 93)
atgAATAACGGTACCAATAACTTTCAAAATTTTATCGGGATCTCCTCGTTGCAAAAAACTCTTCGTAATGCTTTAATCCCGACT
GAGACAACACAGCAGTTCATCGTTAAAAACGGCATCATTAAAGAAGATGAGCTGCGCGGCGAGAACCGTCAGATTTTAAAGGAC
ATCATGGACGACTATTACCGTGGGTTCATCTCAGAAACATTAAGCAGCATCGATGATATCGACTGGACCTCACTGTTTGAGAAG
ATGGAGATTCAACTTAAGAATGGAGACAACAAAGACACTTTAATTAAGGAGCAGACGGAATATCGTAAAGCTATCCATAAAAAA
TTTGCAAACGATGACCGTTTCAAAAATATGTTTTCCGCAAAATTGATTAGCGACATTTTACCTGAATTCGTAATCCATAACAAC
AACTATTCCGCATCTGAAAAAGAGGAGAAGACCCAAGTTATCAAACTTTTTTCACGTTTCGCGACATCTTTTAAAGACTACTTT
AAGAATCGTGCGAATTGTTTCAGTGCAGATGATATTTCGTCTAGTTCATGTCACCGTATCGTGAATGACAACGCTGAGATTTTC
TTTTCTAATGCGTTGGTGTATCGCCGCATCGTAAAGTCCTTGTCGAATGATGATATCAACAAAATTAGTGGTGACATGAAAGAC
TCCCTGAAAGAAATGTCATTAGAGGAGATTTACAGCTACGAAAAATACGGAGAGTTCATCACTCAGGAAGGTATCTCCTTTTAC
AACGATATTTGCGGCAAAGTTAATAGTTTCATGAATCTGTATTGTCAGAAGAATAAGGAAAACAAGAATCTGTACAAGTTACAA
AAGCTTCATAAACAGATCTTGTGCATCGCCGACACGTCTTATGAAGTCCCGTATAAATTTGAAAGCGACGAAGAAGTATATCAG
AGTGTGAATGGATTCTTGGACAATATCTCATCAAAACACATTGTTGAACGTTTGCGCAAAATCGGCGACAACTATAACGGATAC
AACTTGGATAAAATTTATATCGTATCAAAATTTTATGAATCAGTATCCCAAAAGACTTACCGTGATTGGGAGACTATTAATACG
GCGTTAGAAATCCATTACAACAACATTCTGCCGGGTAACGGTAAATCGAAAGCGGACAAAGTGAAGAAGGCGGTTAAGAACGAT
CTTCAGAAGTCTATCACGGAGATTAATGAGCTGGTTTCCAATTACAAGTTGTGCTCGGATGATAACATCAAAGCTGAAACCTAT
ATCCATGAAATTTCTCATATTCTTAATAACTTCGAGGCACAAGAATTAAAATATAACCCAGAAATTCATCTGGTTGAGAGCGAA
CTTAAAGCTTCAGAATTAAAAAATGTTTTGGACGTAATTATGAACGCCTTCCATTGGTGCAGCGTGTTTATGACAGAGGAGTTA
GTAGATAAGGATAACAACTTTTATGCAGAATTGGAAGAGATCTATGATGAGATCTATCCAGTGATTTCACTGTATAACTTAGTC
CGTAATTACGTCACTCAGAAGCCGTACTCAACTAAACCGATCAAGTTAAATTTTGGAATTCCGACATTGGCGGATGGTTGGAGT
AAGTCTAAGGAATACTCAAATAACGCTATTATCTTAATGCGTGACAACCTGTATTACTTGGGTATTTTCAATGCCAAAAATAAG
CCCGATAAAAAAATCATTGAAGGGAATACTTCAGAAAATAAGGGAGATTACAAAAAAATGATTTATAACCTTTTGCCAGGCCCA
AACAAAATGATCCCCAAGGTGTTTTTGAGTAGTAAGACGGGAGTAGAAACATATAAGCCATCAGCGTACATTCTTGAAGGGTAC
AAACAAAATAAACACATCAAGAGCAGCAAGGACTTTGACATTACATTTTGTCATGACTTAATCGACTACTTTAAAAATTGCATT
GCCATTCACCCTGAGTGGAAAAATTTTGGTTTCGACTTCAGTGATACCTCTACCTATGAAGATATCTCTGGTTTTTATCGTGAG
GTAGAACTTCAGGGTTACAAGATCGATTGGACGTACATTTCCGAGAAAGACATTGATCTTTTACAAGAGAAGGGTCAGCTTTAC
TTATTTCAGATCTACAATAAAGACTTTTCGAAAAAATCCACGGGCAACGACAACCTTCATACAATGTACTTAAAGAACCTGTTC
TCTGAAGAAAACTTGAAAGATATCGTGCTTAAATTGAATGGCGAGGCCGAGATTTTTTTCCGTAAAAGCTCGATTAAGAATCCC
ATCATCCACAAGAAAGGCAGCATTCTGGTAAATCGTACCTATGAAGCGGAGGAAAAGGACCAATTTGGTAATATTCAGATTGTC
CGTAAGAACATCCCTGAAAATATCTATCAAGAATTATATAAATATTTCAACGATAAGTCGGACAAGGAACTTAGCGATGAAGCC
GCGAAGTTGAAAAATGTTGTTGGTCACCACGAAGCAGCAACAAACATTGTGAAAGACTATCGCTACACTTACGATAAGTACTTT
TTACATATGCCTATTACGATTAACTTTAAGGCAAATAAGACAGGTTTTATCAACGACCGTATCCTGCAATATATTGCAAAAGAG
AAGGACCTGCATGTCATTGGGATTGATCGCGGTGAACGCAATCTGATTTACGTGAGTGTTATTGATACCTGCGGTAATATTGTT
GAGCAAAAGTCTTTTAATATCGTTAATGGTTACGACTACCAAATTAAGCTTAAACAACAGGAAGGTGCCCGCCAGATCGCCCGT
AAGGAGTGGAAGGAAATCGGAAAAATTAAGGAAATCAAAGAGGGATATCTGAGCTTGGTTATTCATGAAATCTCAAAGATGGTT
ATTAAGTACAACGCCATCATCGCTATGGAAGACTTATCGTATGGGTTTAAAAAGGGTCGTTTCAAAGTTGAGCGCCAGGTCTAC
CAAAAGTTTGAAACGATGCTTATTAATAAATTAAACTACTTGGTTTTCAAAGATATCTCTATTACCGAGAATGGAGGTTTACTG
AAAGGATACCAGTTAACGTATATCCCCGATAAGCTTAAAAACGTGGGCCATCAGTGTGGCTGTATTTTCTATGTGCCCGCGGCA
TATACATCAAAAATTGACCCGACGACGGGTTTCGTTAATATCTTCAAGTTCAAAGATCTGACAGTTGATGCAAAACGCGAATTC
ATTAAGAAGTTCGATAGTATTCGCTATGACTCCGAGAAAAATTTGTTTTGCTTCACTTTTGACTACAATAACTTTATTACTCAG
AATACAGTCATGAGTAAAAGCTCCTGGTCGGTTTACACGTACGGGGTACGCATCAAACGTCGTTTTGTGAATGGTCGTTTTAGT
AATGAGTCGGATACAATTGATATTACCAAGGATATGGAGAAGACTCTGGAAATGACAGACATCAATTGGCGTGATGGACATGAT
TTGCGTCAGGACATTATCGACTATGAGATTGTGCAGCATATTTTCGAAATTTTTCGCCTGACGGTGCAAATGCGTAATTCCTTA
AGCGAACTGGAAGATCGCGACTATGACCGCTTAATTTCTCCTGTGCTGAATGAGAACAACATCTTCTATGACTCAGCGAAAGCC
GGGGACGCTTTGCCAAAGGATGCAGATGCTAACGGTGCATATTGTATTGCTCTGAAAGGCCTTTACGAGATCAAACAAATTACT
GAAAACTGGAAGGAAGATGGAAAGTTTTCCCGTGATAAATTGAAGATCTCTAATAAGGACTGGTTTGACTTTATCCAAAATAAA
CGTTATTTA
ErCas12a-K517P-AA (SEQ ID NO: 94)
MNNGTNNFQNFIGISSLQKTLRNALIPTETTQQFIVKNGIIKEDELRGENRQILKDIMDDYYRGFISETLSSIDDIDWTSLFEK
MEIQLKNGDNKDTLIKEQTEYRKAIHKKFANDDRFKNMFSAKLISDILPEFVIHNNNYSASEKEEKTQVIKLFSRFATSFKDYF
KNRANCFSADDISSSSCHRIVNDNAEIFFSNALVYRRIVKSLSNDDINKISGDMKDSLKEMSLEEIYSYEKYGEFITQEGISFY
NDICGKVNSFMNLYCQKNKENKNLYKLQKLHKQILCIADTSYEVPYKFESDEEVYQSVNGFLDNISSKHIVERLRKIGDNYNGY
NLDKIYIVSKFYESVSQKTYRDWETINTALEIHYNNILPGNGKSKADKVKKAVKNDLQKSITEINELVSNYKLCSDDNIKAETY
IHEISHILNNFEAQELKYNPEIHLVESELKASELKNVLDVIMNAFHWCSVFMTEELVDKDNNFYAELEEIYDEIYPVISLYNLV
RNYVTQKPYSTKPIKLNFGIPTLADGWSKSKEYSNNAIILMRDNLYYLGIFNAKNKPDKKIIEGNTSENKGDYKKMIYNLLPGP
NKMIPKVFLSSKTGVETYKPSAYILEGYKQNKHIKSSKDFDITFCHDLIDYFKNCIAIHPEWKNFGFDESDTSTYEDISGFYRE
VELQGYKIDWTYISEKDIDLLQEKGQLYLFQIYNKDFSKKSTGNDNLHTMYLKNLFSEENLKDIVLKLNGEAEIFFRKSSIKNP
IIHKKGSILVNRTYEAEEKDQFGNIQIVRKNIPENIYQELYKYFNDKSDKELSDEAAKLKNVVGHHEAATNIVKDYRYTYDKYF
LHMPITINFKANKTGFINDRILQYIAKEKDLHVIGIDRGERNLIYVSVIDTCGNIVEQKSFNIVNGYDYQIKLKQQEGARQIAR
KEWKEIGKIKEIKEGYLSLVIHEISKMVIKYNAIIAMEDLSYGFKKGRFKVERQVYQKFETMLINKLNYLVFKDISITENGGLL
KGYQLTYIPDKLKNVGHQCGCIFYVPAAYTSKIDPTTGFVNIFKFKDLTVDAKREFIKKFDSIRYDSEKNLFCFTFDYNNFITQ
NTVMSKSSWSVYTYGVRIKRRFVNGRFSNESDTIDITKDMEKTLEMTDINWRDGHDLRQDIIDYEIVQHIFEIFRLTVQMRNSL
SELEDRDYDRLISPVLNENNIFYDSAKAGDALPKDADANGAYCIALKGLYEIKQITENWKEDGKFSRDKLKISNKDWFDFIQNK
RYL
ErCas12a-I518P-NT (SEQ ID NO: 95)
atgAATAACGGTACCAATAACTTTCAAAATTTTATCGGGATCTCCTCGTTGCAAAAAACTCTTCGTAATGCTTTAATCCCGACT
GAGACAACACAGCAGTTCATCGTTAAAAACGGCATCATTAAAGAAGATGAGCTGCGCGGCGAGAACCGTCAGATTTTAAAGGAC
ATCATGGACGACTATTACCGTGGGTTCATCTCAGAAACATTAAGCAGCATCGATGATATCGACTGGACCTCACTGTTTGAGAAG
ATGGAGATTCAACTTAAGAATGGAGACAACAAAGACACTTTAATTAAGGAGCAGACGGAATATCGTAAAGCTATCCATAAAAAA
TTTGCAAACGATGACCGTTTCAAAAATATGTTTTCCGCAAAATTGATTAGCGACATTTTACCTGAATTCGTAATCCATAACAAC
AACTATTCCGCATCTGAAAAAGAGGAGAAGACCCAAGTTATCAAACTTTTTTCACGTTTCGCGACATCTTTTAAAGACTACTTT
AAGAATCGTGCGAATTGTTTCAGTGCAGATGATATTTCGTCTAGTTCATGTCACCGTATCGTGAATGACAACGCTGAGATTTTC
TTTTCTAATGCGTTGGTGTATCGCCGCATCGTAAAGTCCTTGTCGAATGATGATATCAACAAAATTAGTGGTGACATGAAAGAC
TCCCTGAAAGAAATGTCATTAGAGGAGATTTACAGCTACGAAAAATACGGAGAGTTCATCACTCAGGAAGGTATCTCCTTTTAC
AACGATATTTGCGGCAAAGTTAATAGTTTCATGAATCTGTATTGTCAGAAGAATAAGGAAAACAAGAATCTGTACAAGTTACAA
AAGCTTCATAAACAGATCTTGTGCATCGCCGACACGTCTTATGAAGTCCCGTATAAATTTGAAAGCGACGAAGAAGTATATCAG
AGTGTGAATGGATTCTTGGACAATATCTCATCAAAACACATTGTTGAACGTTTGCGCAAAATCGGCGACAACTATAACGGATAC
AACTTGGATAAAATTTATATCGTATCAAAATTTTATGAATCAGTATCCCAAAAGACTTACCGTGATTGGGAGACTATTAATACG
GCGTTAGAAATCCATTACAACAACATTCTGCCGGGTAACGGTAAATCGAAAGCGGACAAAGTGAAGAAGGCGGTTAAGAACGAT
CTTCAGAAGTCTATCACGGAGATTAATGAGCTGGTTTCCAATTACAAGTTGTGCTCGGATGATAACATCAAAGCTGAAACCTAT
ATCCATGAAATTTCTCATATTCTTAATAACTTCGAGGCACAAGAATTAAAATATAACCCAGAAATTCATCTGGTTGAGAGCGAA
CTTAAAGCTTCAGAATTAAAAAATGTTTTGGACGTAATTATGAACGCCTTCCATTGGTGCAGCGTGTTTATGACAGAGGAGTTA
GTAGATAAGGATAACAACTTTTATGCAGAATTGGAAGAGATCTATGATGAGATCTATCCAGTGATTTCACTGTATAACTTAGTC
CGTAATTACGTCACTCAGAAGCCGTACTCAACTAAAAAGCCGAAGTTAAATTTTGGAATTCCGACATTGGCGGATGGTTGGAGT
AAGTCTAAGGAATACTCAAATAACGCTATTATCTTAATGCGTGACAACCTGTATTACTTGGGTATTTTCAATGCCAAAAATAAG
CCCGATAAAAAAATCATTGAAGGGAATACTTCAGAAAATAAGGGAGATTACAAAAAAATGATTTATAACCTTTTGCCAGGCCCA
AACAAAATGATCCCCAAGGTGTTTTTGAGTAGTAAGACGGGAGTAGAAACATATAAGCCATCAGCGTACATTCTTGAAGGGTAC
AAACAAAATAAACACATCAAGAGCAGCAAGGACTTTGACATTACATTTTGTCATGACTTAATCGACTACTTTAAAAATTGCATT
GCCATTCACCCTGAGTGGAAAAATTTTGGTTTCGACTTCAGTGATACCTCTACCTATGAAGATATCTCTGGTTTTTATCGTGAG
GTAGAACTTCAGGGTTACAAGATCGATTGGACGTACATTTCCGAGAAAGACATTGATCTTTTACAAGAGAAGGGTCAGCTTTAC
TTATTTCAGATCTACAATAAAGACTTTTCGAAAAAATCCACGGGCAACGACAACCTTCATACAATGTACTTAAAGAACCTGTTC
TCTGAAGAAAACTTGAAAGATATCGTGCTTAAATTGAATGGCGAGGCCGAGATTTTTTTCCGTAAAAGCTCGATTAAGAATCCC
ATCATCCACAAGAAAGGCAGCATTCTGGTAAATCGTACCTATGAAGCGGAGGAAAAGGACCAATTTGGTAATATTCAGATTGTC
CGTAAGAACATCCCTGAAAATATCTATCAAGAATTATATAAATATTTCAACGATAAGTCGGACAAGGAACTTAGCGATGAAGCC
GCGAAGTTGAAAAATGTTGTTGGTCACCACGAAGCAGCAACAAACATTGTGAAAGACTATCGCTACACTTACGATAAGTACTTT
TTACATATGCCTATTACGATTAACTTTAAGGCAAATAAGACAGGTTTTATCAACGACCGTATCCTGCAATATATTGCAAAAGAG
AAGGACCTGCATGTCATTGGGATTGATCGCGGTGAACGCAATCTGATTTACGTGAGTGTTATTGATACCTGCGGTAATATTGTT
GAGCAAAAGTCTTTTAATATCGTTAATGGTTACGACTACCAAATTAAGCTTAAACAACAGGAAGGTGCCCGCCAGATCGCCCGT
AAGGAGTGGAAGGAAATCGGAAAAATTAAGGAAATCAAAGAGGGATATCTGAGCTTGGTTATTCATGAAATCTCAAAGATGGTT
ATTAAGTACAACGCCATCATCGCTATGGAAGACTTATCGTATGGGTTTAAAAAGGGTCGTTTCAAAGTTGAGCGCCAGGTCTAC
CAAAAGTTTGAAACGATGCTTATTAATAAATTAAACTACTTGGTTTTCAAAGATATCTCTATTACCGAGAATGGAGGTTTACTG
AAAGGATACCAGTTAACGTATATCCCCGATAAGCTTAAAAACGTGGGCCATCAGTGTGGCTGTATTTTCTATGTGCCCGCGGCA
TATACATCAAAAATTGACCCGACGACGGGTTTCGTTAATATCTTCAAGTTCAAAGATCTGACAGTTGATGCAAAACGCGAATTC
ATTAAGAAGTTCGATAGTATTCGCTATGACTCCGAGAAAAATTTGTTTTGCTTCACTTTTGACTACAATAACTTTATTACTCAG
AATACAGTCATGAGTAAAAGCTCCTGGTCGGTTTACACGTACGGGGTACGCATCAAACGTCGTTTTGTGAATGGTCGTTTTAGT
AATGAGTCGGATACAATTGATATTACCAAGGATATGGAGAAGACTCTGGAAATGACAGACATCAATTGGCGTGATGGACATGAT
TTGCGTCAGGACATTATCGACTATGAGATTGTGCAGCATATTTTCGAAATTTTTCGCCTGACGGTGCAAATGCGTAATTCCTTA
AGCGAACTGGAAGATCGCGACTATGACCGCTTAATTTCTCCTGTGCTGAATGAGAACAACATCTTCTATGACTCAGCGAAAGCC
GGGGACGCTTTGCCAAAGGATGCAGATGCTAACGGTGCATATTGTATTGCTCTGAAAGGCCTTTACGAGATCAAACAAATTACT
GAAAACTGGAAGGAAGATGGAAAGTTTTCCCGTGATAAATTGAAGATCTCTAATAAGGACTGGTTTGACTTTATCCAAAATAAA
CGTTATTTA
ErCas12a-I518P-AA (SEQ ID NO: 96)
MNNGTNNFQNFIGISSLQKTLRNALIPTETTQQFIVKNGIIKEDELRGENRQILKDIMDDYYRGFISETLSSIDDIDWTSLFEK
MEIQLKNGDNKDTLIKEQTEYRKAIHKKFANDDRFKNMFSAKLISDILPEFVIHNNNYSASEKEEKTQVIKLFSRFATSFKDYF
KNRANCESADDISSSSCHRIVNDNAEIFFSNALVYRRIVKSLSNDDINKISGDMKDSLKEMSLEEIYSYEKYGEFITQEGISFY
NDICGKVNSFMNLYCQKNKENKNLYKLQKLHKQILCIADTSYEVPYKFESDEEVYQSVNGELDNISSKHIVERLRKIGDNYNGY
NLDKIYIVSKFYESVSQKTYRDWETINTALEIHYNNILPGNGKSKADKVKKAVKNDLQKSITEINELVSNYKLCSDDNIKAETY
IHEISHILNNFEAQELKYNPEIHLVESELKASELKNVLDVIMNAFHWCSVFMTEELVDKDNNFYAELEEIYDEIYPVISLYNLV
RNYVTQKPYSTKKPKLNFGIPTLADGWSKSKEYSNNAIILMRDNLYYLGIFNAKNKPDKKIIEGNTSENKGDYKKMIYNLLPGP
NKMIPKVFLSSKTGVETYKPSAYILEGYKQNKHIKSSKDFDITFCHDLIDYFKNCIAIHPEWKNFGFDFSDTSTYEDISGFYRE
VELQGYKIDWTYISEKDIDLLQEKGQLYLFQIYNKDFSKKSTGNDNLHTMYLKNLFSEENLKDIVLKLNGEAEIFFRKSSIKNP
IIHKKGSILVNRTYEAEEKDQFGNIQIVRKNIPENIYQELYKYFNDKSDKELSDEAAKLKNVVGHHEAATNIVKDYRYTYDKYF
LHMPITINFKANKTGFINDRILQYIAKEKDLHVIGIDRGERNLIYVSVIDTCGNIVEQKSFNIVNGYDYQIKLKQQEGARQIAR
KEWKEIGKIKEIKEGYLSLVIHEISKMVIKYNAIIAMEDLSYGFKKGRFKVERQVYQKFETMLINKLNYLVFKDISITENGGLL
KGYQLTYIPDKLKNVGHQCGCIFYVPAAYTSKIDPTTGFVNIFKFKDLTVDAKREFIKKFDSIRYDSEKNLFCFTFDYNNFITQ
NTVMSKSSWSVYTYGVRIKRRFVNGRFSNESDTIDITKDMEKTLEMTDINWRDGHDLRQDIIDYEIVQHIFEIFRLTVQMRNSL
SELEDRDYDRLISPVLNENNIFYDSAKAGDALPKDADANGAYCIALKGLYEIKQITENWKEDGKFSRDKLKISNKDWFDFIQNK
RYL
ErCas12a-L520M-NT (SEQ ID NO: 97)
atgAATAACGGTACCAATAACTTTCAAAATTTTATCGGGATCTCCTCGTTGCAAAAAACTCTTCGTAATGCTTTAATCCCGACT
GAGACAACACAGCAGTTCATCGTTAAAAACGGCATCATTAAAGAAGATGAGCTGCGCGGCGAGAACCGTCAGATTTTAAAGGAC
ATCATGGACGACTATTACCGTGGGTTCATCTCAGAAACATTAAGCAGCATCGATGATATCGACTGGACCTCACTGTTTGAGAAG
ATGGAGATTCAACTTAAGAATGGAGACAACAAAGACACTTTAATTAAGGAGCAGACGGAATATCGTAAAGCTATCCATAAAAAA
TTTGCAAACGATGACCGTTTCAAAAATATGTTTTCCGCAAAATTGATTAGCGACATTTTACCTGAATTCGTAATCCATAACAAC
AACTATTCCGCATCTGAAAAAGAGGAGAAGACCCAAGTTATCAAACTTTTTTCACGTTTCGCGACATCTTTTAAAGACTACTTT
AAGAATCGTGCGAATTGTTTCAGTGCAGATGATATTTCGTCTAGTTCATGTCACCGTATCGTGAATGACAACGCTGAGATTTTC
TTTTCTAATGCGTTGGTGTATCGCCGCATCGTAAAGTCCTTGTCGAATGATGATATCAACAAAATTAGTGGTGACATGAAAGAC
TCCCTGAAAGAAATGTCATTAGAGGAGATTTACAGCTACGAAAAATACGGAGAGTTCATCACTCAGGAAGGTATCTCCTTTTAC
AACGATATTTGCGGCAAAGTTAATAGTTTCATGAATCTGTATTGTCAGAAGAATAAGGAAAACAAGAATCTGTACAAGTTACAA
AAGCTTCATAAACAGATCTTGTGCATCGCCGACACGTCTTATGAAGTCCCGTATAAATTTGAAAGCGACGAAGAAGTATATCAG
AGTGTGAATGGATTCTTGGACAATATCTCATCAAAACACATTGTTGAACGTTTGCGCAAAATCGGCGACAACTATAACGGATAC
AACTTGGATAAAATTTATATCGTATCAAAATTTTATGAATCAGTATCCCAAAAGACTTACCGTGATTGGGAGACTATTAATACG
GCGTTAGAAATCCATTACAACAACATTCTGCCGGGTAACGGTAAATCGAAAGCGGACAAAGTGAAGAAGGCGGTTAAGAACGAT
CTTCAGAAGTCTATCACGGAGATTAATGAGCTGGTTTCCAATTACAAGTTGTGCTCGGATGATAACATCAAAGCTGAAACCTAT
ATCCATGAAATTTCTCATATTCTTAATAACTTCGAGGCACAAGAATTAAAATATAACCCAGAAATTCATCTGGTTGAGAGCGAA
CTTAAAGCTTCAGAATTAAAAAATGTTTTGGACGTAATTATGAACGCCTTCCATTGGTGCAGCGTGTTTATGACAGAGGAGTTA
GTAGATAAGGATAACAACTTTTATGCAGAATTGGAAGAGATCTATGATGAGATCTATCCAGTGATTTCACTGTATAACTTAGTC
CGTAATTACGTCACTCAGAAGCCGTACTCAACTAAAAAGATCAAGATGAATTTTGGAATTCCGACATTGGCGGATGGTTGGAGT
AAGTCTAAGGAATACTCAAATAACGCTATTATCTTAATGCGTGACAACCTGTATTACTTGGGTATTTTCAATGCCAAAAATAAG
CCCGATAAAAAAATCATTGAAGGGAATACTTCAGAAAATAAGGGAGATTACAAAAAAATGATTTATAACCTTTTGCCAGGCCCA
AACAAAATGATCCCCAAGGTGTTTTTGAGTAGTAAGACGGGAGTAGAAACATATAAGCCATCAGCGTACATTCTTGAAGGGTAC
AAACAAAATAAACACATCAAGAGCAGCAAGGACTTTGACATTACATTTTGTCATGACTTAATCGACTACTTTAAAAATTGCATT
GCCATTCACCCTGAGTGGAAAAATTTTGGTTTCGACTTCAGTGATACCTCTACCTATGAAGATATCTCTGGTTTTTATCGTGAG
GTAGAACTTCAGGGTTACAAGATCGATTGGACGTACATTTCCGAGAAAGACATTGATCTTTTACAAGAGAAGGGTCAGCTTTAC
TTATTTCAGATCTACAATAAAGACTTTTCGAAAAAATCCACGGGCAACGACAACCTTCATACAATGTACTTAAAGAACCTGTTC
TCTGAAGAAAACTTGAAAGATATCGTGCTTAAATTGAATGGCGAGGCCGAGATTTTTTTCCGTAAAAGCTCGATTAAGAATCCC
ATCATCCACAAGAAAGGCAGCATTCTGGTAAATCGTACCTATGAAGCGGAGGAAAAGGACCAATTTGGTAATATTCAGATTGTC
CGTAAGAACATCCCTGAAAATATCTATCAAGAATTATATAAATATTTCAACGATAAGTCGGACAAGGAACTTAGCGATGAAGCC
GCGAAGTTGAAAAATGTTGTTGGTCACCACGAAGCAGCAACAAACATTGTGAAAGACTATCGCTACACTTACGATAAGTACTTT
TTACATATGCCTATTACGATTAACTTTAAGGCAAATAAGACAGGTTTTATCAACGACCGTATCCTGCAATATATTGCAAAAGAG
AAGGACCTGCATGTCATTGGGATTGATCGCGGTGAACGCAATCTGATTTACGTGAGTGTTATTGATACCTGCGGTAATATTGTT
GAGCAAAAGTCTTTTAATATCGTTAATGGTTACGACTACCAAATTAAGCTTAAACAACAGGAAGGTGCCCGCCAGATCGCCCGT
AAGGAGTGGAAGGAAATCGGAAAAATTAAGGAAATCAAAGAGGGATATCTGAGCTTGGTTATTCATGAAATCTCAAAGATGGTT
ATTAAGTACAACGCCATCATCGCTATGGAAGACTTATCGTATGGGTTTAAAAAGGGTCGTTTCAAAGTTGAGCGCCAGGTCTAC
CAAAAGTTTGAAACGATGCTTATTAATAAATTAAACTACTTGGTTTTCAAAGATATCTCTATTACCGAGAATGGAGGTTTACTG
AAAGGATACCAGTTAACGTATATCCCCGATAAGCTTAAAAACGTGGGCCATCAGTGTGGCTGTATTTTCTATGTGCCCGCGGCA
TATACATCAAAAATTGACCCGACGACGGGTTTCGTTAATATCTTCAAGTTCAAAGATCTGACAGTTGATGCAAAACGCGAATTC
ATTAAGAAGTTCGATAGTATTCGCTATGACTCCGAGAAAAATTTGTTTTGCTTCACTTTTGACTACAATAACTTTATTACTCAG
AATACAGTCATGAGTAAAAGCTCCTGGTCGGTTTACACGTACGGGGTACGCATCAAACGTCGTTTTGTGAATGGTCGTTTTAGT
AATGAGTCGGATACAATTGATATTACCAAGGATATGGAGAAGACTCTGGAAATGACAGACATCAATTGGCGTGATGGACATGAT
TTGCGTCAGGACATTATCGACTATGAGATTGTGCAGCATATTTTCGAAATTTTTCGCCTGACGGTGCAAATGCGTAATTCCTTA
AGCGAACTGGAAGATCGCGACTATGACCGCTTAATTTCTCCTGTGCTGAATGAGAACAACATCTTCTATGACTCAGCGAAAGCC
GGGGACGCTTTGCCAAAGGATGCAGATGCTAACGGTGCATATTGTATTGCTCTGAAAGGCCTTTACGAGATCAAACAAATTACT
GAAAACTGGAAGGAAGATGGAAAGTTTTCCCGTGATAAATTGAAGATCTCTAATAAGGACTGGTTTGACTTTATCCAAAATAAA
CGTTATTTA
ErCas12a-L520M-AA (SEQ ID NO: 98)
MNNGTNNFQNFIGISSLQKTLRNALIPTETTQQFIVKNGIIKEDELRGENRQILKDIMDDYYRGFISETLSSIDDIDWTSLFEK
MEIQLKNGDNKDTLIKEQTEYRKAIHKKFANDDRFKNMFSAKLISDILPEFVIHNNNYSASEKEEKTQVIKLESRFATSFKDYF
KNRANCFSADDISSSSCHRIVNDNAEIFFSNALVYRRIVKSLSNDDINKISGDMKDSLKEMSLEEIYSYEKYGEFITQEGISFY
NDICGKVNSFMNLYCQKNKENKNLYKLQKLHKQILCIADTSYEVPYKFESDEEVYQSVNGELDNISSKHIVERLRKIGDNYNGY
NLDKIYIVSKFYESVSQKTYRDWETINTALEIHYNNILPGNGKSKADKVKKAVKNDLQKSITEINELVSNYKLCSDDNIKAETY
IHEISHILNNFEAQELKYNPEIHLVESELKASELKNVLDVIMNAFHWCSVFMTEELVDKDNNFYAELEEIYDEIYPVISLYNLV
RNYVTQKPYSTKKIKMNFGIPTLADGWSKSKEYSNNAIILMRDNLYYLGIFNAKNKPDKKIIEGNTSENKGDYKKMIYNLLPGP
NKMIPKVFLSSKTGVETYKPSAYILEGYKQNKHIKSSKDFDITFCHDLIDYFKNCIAIHPEWKNFGFDFSDTSTYEDISGFYRE
VELQGYKIDWTYISEKDIDLLQEKGQLYLFQIYNKDFSKKSTGNDNLHTMYLKNLFSEENLKDIVLKLNGEAEIFFRKSSIKNP
IIHKKGSILVNRTYEAEEKDQFGNIQIVRKNIPENIYQELYKYFNDKSDKELSDEAAKLKNVVGHHEAATNIVKDYRYTYDKYF
LHMPITINFKANKTGFINDRILQYIAKEKDLHVIGIDRGERNLIYVSVIDTCGNIVEQKSFNIVNGYDYQIKLKQQEGARQIAR
KEWKEIGKIKEIKEGYLSLVIHEISKMVIKYNAIIAMEDLSYGFKKGRFKVERQVYQKFETMLINKLNYLVFKDISITENGGLL
KGYQLTYIPDKLKNVGHQCGCIFYVPAAYTSKIDPTTGFVNIFKFKDLTVDAKREFIKKFDSIRYDSEKNLFCFTFDYNNFITQ
NTVMSKSSWSVYTYGVRIKRRFVNGRFSNESDTIDITKDMEKTLEMTDINWRDGHDLRQDIIDYEIVQHIFEIFRLTVQMRNSL
SELEDRDYDRLISPVLNENNIFYDSAKAGDALPKDADANGAYCIALKGLYEIKQITENWKEDGKFSRDKLKISNKDWEDFIQNK
RYL
ErCas12a-F522A-NT (SEQ ID NO: 99)
atgAATAACGGTACCAATAACTTTCAAAATTTTATCGGGATCTCCTCGTTGCAAAAAACTCTTCGTAATGCTTTAATCCCGACT
GAGACAACACAGCAGTTCATCGTTAAAAACGGCATCATTAAAGAAGATGAGCTGCGCGGCGAGAACCGTCAGATTTTAAAGGAC
ATCATGGACGACTATTACCGTGGGTTCATCTCAGAAACATTAAGCAGCATCGATGATATCGACTGGACCTCACTGTTTGAGAAG
ATGGAGATTCAACTTAAGAATGGAGACAACAAAGACACTTTAATTAAGGAGCAGACGGAATATCGTAAAGCTATCCATAAAAAA
TTTGCAAACGATGACCGTTTCAAAAATATGTTTTCCGCAAAATTGATTAGCGACATTTTACCTGAATTCGTAATCCATAACAAC
AACTATTCCGCATCTGAAAAAGAGGAGAAGACCCAAGTTATCAAACTTTTTTCACGTTTCGCGACATCTTTTAAAGACTACTTT
AAGAATCGTGCGAATTGTTTCAGTGCAGATGATATTTCGTCTAGTTCATGTCACCGTATCGTGAATGACAACGCTGAGATTTTC
TTTTCTAATGCGTTGGTGTATCGCCGCATCGTAAAGTCCTTGTCGAATGATGATATCAACAAAATTAGTGGTGACATGAAAGAC
TCCCTGAAAGAAATGTCATTAGAGGAGATTTACAGCTACGAAAAATACGGAGAGTTCATCACTCAGGAAGGTATCTCCTTTTAC
AACGATATTTGCGGCAAAGTTAATAGTTTCATGAATCTGTATTGTCAGAAGAATAAGGAAAACAAGAATCTGTACAAGTTACAA
AAGCTTCATAAACAGATCTTGTGCATCGCCGACACGTCTTATGAAGTCCCGTATAAATTTGAAAGCGACGAAGAAGTATATCAG
AGTGTGAATGGATTCTTGGACAATATCTCATCAAAACACATTGTTGAACGTTTGCGCAAAATCGGCGACAACTATAACGGATAC
AACTTGGATAAAATTTATATCGTATCAAAATTTTATGAATCAGTATCCCAAAAGACTTACCGTGATTGGGAGACTATTAATACG
GCGTTAGAAATCCATTACAACAACATTCTGCCGGGTAACGGTAAATCGAAAGCGGACAAAGTGAAGAAGGCGGTTAAGAACGAT
CTTCAGAAGTCTATCACGGAGATTAATGAGCTGGTTTCCAATTACAAGTTGTGCTCGGATGATAACATCAAAGCTGAAACCTAT
ATCCATGAAATTTCTCATATTCTTAATAACTTCGAGGCACAAGAATTAAAATATAACCCAGAAATTCATCTGGTTGAGAGCGAA
CTTAAAGCTTCAGAATTAAAAAATGTTTTGGACGTAATTATGAACGCCTTCCATTGGTGCAGCGTGTTTATGACAGAGGAGTTA
GTAGATAAGGATAACAACTTTTATGCAGAATTGGAAGAGATCTATGATGAGATCTATCCAGTGATTTCACTGTATAACTTAGTC
CGTAATTACGTCACTCAGAAGCCGTACTCAACTAAAAAGATCAAGTTAAATGCGGGAATTCCGACATTGGCGGATGGTTGGAGT
AAGTCTAAGGAATACTCAAATAACGCTATTATCTTAATGCGTGACAACCTGTATTACTTGGGTATTTTCAATGCCAAAAATAAG
CCCGATAAAAAAATCATTGAAGGGAATACTTCAGAAAATAAGGGAGATTACAAAAAAATGATTTATAACCTTTTGCCAGGCCCA
AACAAAATGATCCCCAAGGTGTTTTTGAGTAGTAAGACGGGAGTAGAAACATATAAGCCATCAGCGTACATTCTTGAAGGGTAC
AAACAAAATAAACACATCAAGAGCAGCAAGGACTTTGACATTACATTTTGTCATGACTTAATCGACTACTTTAAAAATTGCATT
GCCATTCACCCTGAGTGGAAAAATTTTGGTTTCGACTTCAGTGATACCTCTACCTATGAAGATATCTCTGGTTTTTATCGTGAG
GTAGAACTTCAGGGTTACAAGATCGATTGGACGTACATTTCCGAGAAAGACATTGATCTTTTACAAGAGAAGGGTCAGCTTTAC
TTATTTCAGATCTACAATAAAGACTTTTCGAAAAAATCCACGGGCAACGACAACCTTCATACAATGTACTTAAAGAACCTGTTC
TCTGAAGAAAACTTGAAAGATATCGTGCTTAAATTGAATGGCGAGGCCGAGATTTTTTTCCGTAAAAGCTCGATTAAGAATCCC
ATCATCCACAAGAAAGGCAGCATTCTGGTAAATCGTACCTATGAAGCGGAGGAAAAGGACCAATTTGGTAATATTCAGATTGTC
CGTAAGAACATCCCTGAAAATATCTATCAAGAATTATATAAATATTTCAACGATAAGTCGGACAAGGAACTTAGCGATGAAGCC
GCGAAGTTGAAAAATGTTGTTGGTCACCACGAAGCAGCAACAAACATTGTGAAAGACTATCGCTACACTTACGATAAGTACTTT
TTACATATGCCTATTACGATTAACTTTAAGGCAAATAAGACAGGTTTTATCAACGACCGTATCCTGCAATATATTGCAAAAGAG
AAGGACCTGCATGTCATTGGGATTGATCGCGGTGAACGCAATCTGATTTACGTGAGTGTTATTGATACCTGCGGTAATATTGTT
GAGCAAAAGTCTTTTAATATCGTTAATGGTTACGACTACCAAATTAAGCTTAAACAACAGGAAGGTGCCCGCCAGATCGCCCGT
AAGGAGTGGAAGGAAATCGGAAAAATTAAGGAAATCAAAGAGGGATATCTGAGCTTGGTTATTCATGAAATCTCAAAGATGGTT
ATTAAGTACAACGCCATCATCGCTATGGAAGACTTATCGTATGGGTTTAAAAAGGGTCGTTTCAAAGTTGAGCGCCAGGTCTAC
CAAAAGTTTGAAACGATGCTTATTAATAAATTAAACTACTTGGTTTTCAAAGATATCTCTATTACCGAGAATGGAGGTTTACTG
AAAGGATACCAGTTAACGTATATCCCCGATAAGCTTAAAAACGTGGGCCATCAGTGTGGCTGTATTTTCTATGTGCCCGCGGCA
TATACATCAAAAATTGACCCGACGACGGGTTTCGTTAATATCTTCAAGTTCAAAGATCTGACAGTTGATGCAAAACGCGAATTC
ATTAAGAAGTTCGATAGTATTCGCTATGACTCCGAGAAAAATTTGTTTTGCTTCACTTTTGACTACAATAACTTTATTACTCAG
AATACAGTCATGAGTAAAAGCTCCTGGTCGGTTTACACGTACGGGGTACGCATCAAACGTCGTTTTGTGAATGGTCGTTTTAGT
AATGAGTCGGATACAATTGATATTACCAAGGATATGGAGAAGACTCTGGAAATGACAGACATCAATTGGCGTGATGGACATGAT
TTGCGTCAGGACATTATCGACTATGAGATTGTGCAGCATATTTTCGAAATTTTTCGCCTGACGGTGCAAATGCGTAATTCCTTA
AGCGAACTGGAAGATCGCGACTATGACCGCTTAATTTCTCCTGTGCTGAATGAGAACAACATCTTCTATGACTCAGCGAAAGCC
GGGGACGCTTTGCCAAAGGATGCAGATGCTAACGGTGCATATTGTATTGCTCTGAAAGGCCTTTACGAGATCAAACAAATTACT
GAAAACTGGAAGGAAGATGGAAAGTTTTCCCGTGATAAATTGAAGATCTCTAATAAGGACTGGTTTGACTTTATCCAAAATAAA
CGTTATTTA
ErCas12a-F522A-AA (SEQ ID NO: 100)
MNNGTNNFQNFIGISSLQKTLRNALIPTETTQQFIVKNGIIKEDELRGENRQILKDIMDDYYRGFISETLSSIDDIDWTSLFEK
MEIQLKNGDNKDTLIKEQTEYRKAIHKKFANDDRFKNMESAKLISDILPEFVIHNNNYSASEKEEKTQVIKLFSRFATSFKDYF
KNRANCFSADDISSSSCHRIVNDNAEIFFSNALVYRRIVKSLSNDDINKISGDMKDSLKEMSLEEIYSYEKYGEFITQEGISFY
NDICGKVNSFMNLYCQKNKENKNLYKLQKLHKQILCIADTSYEVPYKFESDEEVYQSVNGELDNISSKHIVERLRKIGDNYNGY
NLDKIYIVSKFYESVSQKTYRDWETINTALEIHYNNILPGNGKSKADKVKKAVKNDLQKSITEINELVSNYKLCSDDNIKAETY
IHEISHILNNFEAQELKYNPEIHLVESELKASELKNVLDVIMNAFHWCSVFMTEELVDKDNNFYAELEEIYDEIYPVISLYNLV
RNYVTQKPYSTKKIKLNAGIPTLADGWSKSKEYSNNAIILMRDNLYYLGIFNAKNKPDKKIIEGNTSENKGDYKKMIYNLLPGP
NKMIPKVFLSSKTGVETYKPSAYILEGYKQNKHIKSSKDFDITFCHDLIDYFKNCIAIHPEWKNFGFDFSDTSTYEDISGFYRE
VELQGYKIDWTYISEKDIDLLQEKGQLYLFQIYNKDFSKKSTGNDNLHTMYLKNLFSEENLKDIVLKLNGEAEIFFRKSSIKNP
IIHKKGSILVNRTYEAEEKDQFGNIQIVRKNIPENIYQELYKYFNDKSDKELSDEAAKLKNVVGHHEAATNIVKDYRYTYDKYF
LHMPITINFKANKTGFINDRILQYIAKEKDLHVIGIDRGERNLIYVSVIDTCGNIVEQKSFNIVNGYDYQIKLKQQEGARQIAR
KEWKEIGKIKEIKEGYLSLVIHEISKMVIKYNAIIAMEDLSYGFKKGRFKVERQVYQKFETMLINKLNYLVFKDISITENGGLL
KGYQLTYIPDKLKNVGHQCGCIFYVPAAYTSKIDPTTGFVNIFKFKDLTVDAKREFIKKFDSIRYDSEKNLFCFTEDYNNFITQ
NTVMSKSSWSVYTYGVRIKRRFVNGRFSNESDTIDITKDMEKTLEMTDINWRDGHDLRQDIIDYEIVQHIFEIFRLTVQMRNSL
SELEDRDYDRLISPVLNENNIFYDSAKAGDALPKDADANGAYCIALKGLYEIKQITENWKEDGKFSRDKLKISNKDWEDFIQNK
RYL
ErCas12a-A541V-NT (SEQ ID NO: 101)
atgAATAACGGTACCAATAACTTTCAAAATTTTATCGGGATCTCCTCGTTGCAAAAAACTCTTCGTAATGCTTTAATCCCGACT
GAGACAACACAGCAGTTCATCGTTAAAAACGGCATCATTAAAGAAGATGAGCTGCGCGGCGAGAACCGTCAGATTTTAAAGGAC
ATCATGGACGACTATTACCGTGGGTTCATCTCAGAAACATTAAGCAGCATCGATGATATCGACTGGACCTCACTGTTTGAGAAG
ATGGAGATTCAACTTAAGAATGGAGACAACAAAGACACTTTAATTAAGGAGCAGACGGAATATCGTAAAGCTATCCATAAAAAA
TTTGCAAACGATGACCGTTTCAAAAATATGTTTTCCGCAAAATTGATTAGCGACATTTTACCTGAATTCGTAATCCATAACAAC
AACTATTCCGCATCTGAAAAAGAGGAGAAGACCCAAGTTATCAAACTTTTTTCACGTTTCGCGACATCTTTTAAAGACTACTTT
AAGAATCGTGCGAATTGTTTCAGTGCAGATGATATTTCGTCTAGTTCATGTCACCGTATCGTGAATGACAACGCTGAGATTTTC
TTTTCTAATGCGTTGGTGTATCGCCGCATCGTAAAGTCCTTGTCGAATGATGATATCAACAAAATTAGTGGTGACATGAAAGAC
TCCCTGAAAGAAATGTCATTAGAGGAGATTTACAGCTACGAAAAATACGGAGAGTTCATCACTCAGGAAGGTATCTCCTTTTAC
AACGATATTTGCGGCAAAGTTAATAGTTTCATGAATCTGTATTGTCAGAAGAATAAGGAAAACAAGAATCTGTACAAGTTACAA
AAGCTTCATAAACAGATCTTGTGCATCGCCGACACGTCTTATGAAGTCCCGTATAAATTTGAAAGCGACGAAGAAGTATATCAG
AGTGTGAATGGATTCTTGGACAATATCTCATCAAAACACATTGTTGAACGTTTGCGCAAAATCGGCGACAACTATAACGGATAC
AACTTGGATAAAATTTATATCGTATCAAAATTTTATGAATCAGTATCCCAAAAGACTTACCGTGATTGGGAGACTATTAATACG
GCGTTAGAAATCCATTACAACAACATTCTGCCGGGTAACGGTAAATCGAAAGCGGACAAAGTGAAGAAGGCGGTTAAGAACGAT
CTTCAGAAGTCTATCACGGAGATTAATGAGCTGGTTTCCAATTACAAGTTGTGCTCGGATGATAACATCAAAGCTGAAACCTAT
ATCCATGAAATTTCTCATATTCTTAATAACTTCGAGGCACAAGAATTAAAATATAACCCAGAAATTCATCTGGTTGAGAGCGAA
CTTAAAGCTTCAGAATTAAAAAATGTTTTGGACGTAATTATGAACGCCTTCCATTGGTGCAGCGTGTTTATGACAGAGGAGTTA
GTAGATAAGGATAACAACTTTTATGCAGAATTGGAAGAGATCTATGATGAGATCTATCCAGTGATTTCACTGTATAACTTAGTC
CGTAATTACGTCACTCAGAAGCCGTACTCAACTAAAAAGATCAAGTTAAATTTTGGAATTCCGACATTGGCGGATGGTTGGAGT
AAGTCTAAGGAATACTCAAATAACGTGATTATCTTAATGCGTGACAACCTGTATTACTTGGGTATTTTCAATGCCAAAAATAAG
CCCGATAAAAAAATCATTGAAGGGAATACTTCAGAAAATAAGGGAGATTACAAAAAAATGATTTATAACCTTTTGCCAGGCCCA
AACAAAATGATCCCCAAGGTGTTTTTGAGTAGTAAGACGGGAGTAGAAACATATAAGCCATCAGCGTACATTCTTGAAGGGTAC
AAACAAAATAAACACATCAAGAGCAGCAAGGACTTTGACATTACATTTTGTCATGACTTAATCGACTACTTTAAAAATTGCATT
GCCATTCACCCTGAGTGGAAAAATTTTGGTTTCGACTTCAGTGATACCTCTACCTATGAAGATATCTCTGGTTTTTATCGTGAG
GTAGAACTTCAGGGTTACAAGATCGATTGGACGTACATTTCCGAGAAAGACATTGATCTTTTACAAGAGAAGGGTCAGCTTTAC
TTATTTCAGATCTACAATAAAGACTTTTCGAAAAAATCCACGGGCAACGACAACCTTCATACAATGTACTTAAAGAACCTGTTC
TCTGAAGAAAACTTGAAAGATATCGTGCTTAAATTGAATGGCGAGGCCGAGATTTTTTTCCGTAAAAGCTCGATTAAGAATCCC
ATCATCCACAAGAAAGGCAGCATTCTGGTAAATCGTACCTATGAAGCGGAGGAAAAGGACCAATTTGGTAATATTCAGATTGTC
CGTAAGAACATCCCTGAAAATATCTATCAAGAATTATATAAATATTTCAACGATAAGTCGGACAAGGAACTTAGCGATGAAGCC
GCGAAGTTGAAAAATGTTGTTGGTCACCACGAAGCAGCAACAAACATTGTGAAAGACTATCGCTACACTTACGATAAGTACTTT
TTACATATGCCTATTACGATTAACTTTAAGGCAAATAAGACAGGTTTTATCAACGACCGTATCCTGCAATATATTGCAAAAGAG
AAGGACCTGCATGTCATTGGGATTGATCGCGGTGAACGCAATCTGATTTACGTGAGTGTTATTGATACCTGCGGTAATATTGTT
GAGCAAAAGTCTTTTAATATCGTTAATGGTTACGACTACCAAATTAAGCTTAAACAACAGGAAGGTGCCCGCCAGATCGCCCGT
AAGGAGTGGAAGGAAATCGGAAAAATTAAGGAAATCAAAGAGGGATATCTGAGCTTGGTTATTCATGAAATCTCAAAGATGGTT
ATTAAGTACAACGCCATCATCGCTATGGAAGACTTATCGTATGGGTTTAAAAAGGGTCGTTTCAAAGTTGAGCGCCAGGTCTAC
CAAAAGTTTGAAACGATGCTTATTAATAAATTAAACTACTTGGTTTTCAAAGATATCTCTATTACCGAGAATGGAGGTTTACTG
AAAGGATACCAGTTAACGTATATCCCCGATAAGCTTAAAAACGTGGGCCATCAGTGTGGCTGTATTTTCTATGTGCCCGCGGCA
TATACATCAAAAATTGACCCGACGACGGGTTTCGTTAATATCTTCAAGTTCAAAGATCTGACAGTTGATGCAAAACGCGAATTC
ATTAAGAAGTTCGATAGTATTCGCTATGACTCCGAGAAAAATTTGTTTTGCTTCACTTTTGACTACAATAACTTTATTACTCAG
AATACAGTCATGAGTAAAAGCTCCTGGTCGGTTTACACGTACGGGGTACGCATCAAACGTCGTTTTGTGAATGGTCGTTTTAGT
AATGAGTCGGATACAATTGATATTACCAAGGATATGGAGAAGACTCTGGAAATGACAGACATCAATTGGCGTGATGGACATGAT
TTGCGTCAGGACATTATCGACTATGAGATTGTGCAGCATATTTTCGAAATTTTTCGCCTGACGGTGCAAATGCGTAATTCCTTA
AGCGAACTGGAAGATCGCGACTATGACCGCTTAATTTCTCCTGTGCTGAATGAGAACAACATCTTCTATGACTCAGCGAAAGCC
GGGGACGCTTTGCCAAAGGATGCAGATGCTAACGGTGCATATTGTATTGCTCTGAAAGGCCTTTACGAGATCAAACAAATTACT
GAAAACTGGAAGGAAGATGGAAAGTTTTCCCGTGATAAATTGAAGATCTCTAATAAGGACTGGTTTGACTTTATCCAAAATAAA
CGTTATTTA
ErCas12a-A541V-AA (SEQ ID NO: 102)
MNNGTNNFQNFIGISSLQKTLRNALIPTETTQQFIVKNGIIKEDELRGENRQILKDIMDDYYRGFISETLSSIDDIDWTSLFEK
MEIQLKNGDNKDTLIKEQTEYRKAIHKKFANDDRFKNMFSAKLISDILPEFVIHNNNYSASEKEEKTQVIKLFSRFATSFKDYF
KNRANCFSADDISSSSCHRIVNDNAEIFFSNALVYRRIVKSLSNDDINKISGDMKDSLKEMSLEEIYSYEKYGEFITQEGISFY
NDICGKVNSFMNLYCQKNKENKNLYKLQKLHKQILCIADTSYEVPYKFESDEEVYQSVNGELDNISSKHIVERLRKIGDNYNGY
NLDKIYIVSKFYESVSQKTYRDWETINTALEIHYNNILPGNGKSKADKVKKAVKNDLQKSITEINELVSNYKLCSDDNIKAETY
IHEISHILNNFEAQELKYNPEIHLVESELKASELKNVLDVIMNAFHWCSVFMTEELVDKDNNFYAELEEIYDEIYPVISLYNLV
RNYVTQKPYSTKKIKLNFGIPTLADGWSKSKEYSNNVIILMRDNLYYLGIFNAKNKPDKKIIEGNTSENKGDYKKMIYNLLPGP
NKMIPKVFLSSKTGVETYKPSAYILEGYKQNKHIKSSKDFDITFCHDLIDYFKNCIAIHPEWKNFGFDFSDTSTYEDISGFYRE
VELQGYKIDWTYISEKDIDLLQEKGQLYLFQIYNKDFSKKSTGNDNLHTMYLKNLFSEENLKDIVLKLNGEAEIFFRKSSIKNP
IIHKKGSILVNRTYEAEEKDQFGNIQIVRKNIPENIYQELYKYFNDKSDKELSDEAAKLKNVVGHHEAATNIVKDYRYTYDKYF
LHMPITINFKANKTGFINDRILQYIAKEKDLHVIGIDRGERNLIYVSVIDTCGNIVEQKSFNIVNGYDYQIKLKQQEGARQIAR
KEWKEIGKIKEIKEGYLSLVIHEISKMVIKYNAIIAMEDLSYGFKKGRFKVERQVYQKFETMLINKLNYLVFKDISITENGGLL
KGYQLTYIPDKLKNVGHQCGCIFYVPAAYTSKIDPTTGFVNIFKFKDLTVDAKREFIKKFDSIRYDSEKNLFCFTEDYNNFITQ
NTVMSKSSWSVYTYGVRIKRRFVNGRFSNESDTIDITKDMEKTLEMTDINWRDGHDLRQDIIDYEIVQHIFEIFRLTVQMRNSL
SELEDRDYDRLISPVLNENNIFYDSAKAGDALPKDADANGAYCIALKGLYEIKQITENWKEDGKFSRDKLKISNKDWFDFIQNK
RYL
ErCas12a-G553M-NT (SEQ ID NO: 103)
atgAATAACGGTACCAATAACTTTCAAAATTTTATCGGGATCTCCTCGTTGCAAAAAACTCTTCGTAATGCTTTAATCCCGACT
GAGACAACACAGCAGTTCATCGTTAAAAACGGCATCATTAAAGAAGATGAGCTGCGCGGCGAGAACCGTCAGATTTTAAAGGAC
ATCATGGACGACTATTACCGTGGGTTCATCTCAGAAACATTAAGCAGCATCGATGATATCGACTGGACCTCACTGTTTGAGAAG
ATGGAGATTCAACTTAAGAATGGAGACAACAAAGACACTTTAATTAAGGAGCAGACGGAATATCGTAAAGCTATCCATAAAAAA
TTTGCAAACGATGACCGTTTCAAAAATATGTTTTCCGCAAAATTGATTAGCGACATTTTACCTGAATTCGTAATCCATAACAAC
AACTATTCCGCATCTGAAAAAGAGGAGAAGACCCAAGTTATCAAACTTTTTTCACGTTTCGCGACATCTTTTAAAGACTACTTT
AAGAATCGTGCGAATTGTTTCAGTGCAGATGATATTTCGTCTAGTTCATGTCACCGTATCGTGAATGACAACGCTGAGATTTTC
TTTTCTAATGCGTTGGTGTATCGCCGCATCGTAAAGTCCTTGTCGAATGATGATATCAACAAAATTAGTGGTGACATGAAAGAC
TCCCTGAAAGAAATGTCATTAGAGGAGATTTACAGCTACGAAAAATACGGAGAGTTCATCACTCAGGAAGGTATCTCCTTTTAC
AACGATATTTGCGGCAAAGTTAATAGTTTCATGAATCTGTATTGTCAGAAGAATAAGGAAAACAAGAATCTGTACAAGTTACAA
AAGCTTCATAAACAGATCTTGTGCATCGCCGACACGTCTTATGAAGTCCCGTATAAATTTGAAAGCGACGAAGAAGTATATCAG
AGTGTGAATGGATTCTTGGACAATATCTCATCAAAACACATTGTTGAACGTTTGCGCAAAATCGGCGACAACTATAACGGATAC
AACTTGGATAAAATTTATATCGTATCAAAATTTTATGAATCAGTATCCCAAAAGACTTACCGTGATTGGGAGACTATTAATACG
GCGTTAGAAATCCATTACAACAACATTCTGCCGGGTAACGGTAAATCGAAAGCGGACAAAGTGAAGAAGGCGGTTAAGAACGAT
CTTCAGAAGTCTATCACGGAGATTAATGAGCTGGTTTCCAATTACAAGTTGTGCTCGGATGATAACATCAAAGCTGAAACCTAT
ATCCATGAAATTTCTCATATTCTTAATAACTTCGAGGCACAAGAATTAAAATATAACCCAGAAATTCATCTGGTTGAGAGCGAA
CTTAAAGCTTCAGAATTAAAAAATGTTTTGGACGTAATTATGAACGCCTTCCATTGGTGCAGCGTGTTTATGACAGAGGAGTTA
GTAGATAAGGATAACAACTTTTATGCAGAATTGGAAGAGATCTATGATGAGATCTATCCAGTGATTTCACTGTATAACTTAGTC
CGTAATTACGTCACTCAGAAGCCGTACTCAACTAAAAAGATCAAGTTAAATTTTGGAATTCCGACATTGGCGGATGGTTGGAGT
AAGTCTAAGGAATACTCAAATAACGCTATTATCTTAATGCGTGACAACCTGTATTACTTGATGATTTTCAATGCCAAAAATAAG
CCCGATAAAAAAATCATTGAAGGGAATACTTCAGAAAATAAGGGAGATTACAAAAAAATGATTTATAACCTTTTGCCAGGCCCA
AACAAAATGATCCCCAAGGTGTTTTTGAGTAGTAAGACGGGAGTAGAAACATATAAGCCATCAGCGTACATTCTTGAAGGGTAC
AAACAAAATAAACACATCAAGAGCAGCAAGGACTTTGACATTACATTTTGTCATGACTTAATCGACTACTTTAAAAATTGCATT
GCCATTCACCCTGAGTGGAAAAATTTTGGTTTCGACTTCAGTGATACCTCTACCTATGAAGATATCTCTGGTTTTTATCGTGAG
GTAGAACTTCAGGGTTACAAGATCGATTGGACGTACATTTCCGAGAAAGACATTGATCTTTTACAAGAGAAGGGTCAGCTTTAC
TTATTTCAGATCTACAATAAAGACTTTTCGAAAAAATCCACGGGCAACGACAACCTTCATACAATGTACTTAAAGAACCTGTTC
TCTGAAGAAAACTTGAAAGATATCGTGCTTAAATTGAATGGCGAGGCCGAGATTTTTTTCCGTAAAAGCTCGATTAAGAATCCC
ATCATCCACAAGAAAGGCAGCATTCTGGTAAATCGTACCTATGAAGCGGAGGAAAAGGACCAATTTGGTAATATTCAGATTGTC
CGTAAGAACATCCCTGAAAATATCTATCAAGAATTATATAAATATTTCAACGATAAGTCGGACAAGGAACTTAGCGATGAAGCC
GCGAAGTTGAAAAATGTTGTTGGTCACCACGAAGCAGCAACAAACATTGTGAAAGACTATCGCTACACTTACGATAAGTACTTT
TTACATATGCCTATTACGATTAACTTTAAGGCAAATAAGACAGGTTTTATCAACGACCGTATCCTGCAATATATTGCAAAAGAG
AAGGACCTGCATGTCATTGGGATTGATCGCGGTGAACGCAATCTGATTTACGTGAGTGTTATTGATACCTGCGGTAATATTGTT
GAGCAAAAGTCTTTTAATATCGTTAATGGTTACGACTACCAAATTAAGCTTAAACAACAGGAAGGTGCCCGCCAGATCGCCCGT
AAGGAGTGGAAGGAAATCGGAAAAATTAAGGAAATCAAAGAGGGATATCTGAGCTTGGTTATTCATGAAATCTCAAAGATGGTT
ATTAAGTACAACGCCATCATCGCTATGGAAGACTTATCGTATGGGTTTAAAAAGGGTCGTTTCAAAGTTGAGCGCCAGGTCTAC
CAAAAGTTTGAAACGATGCTTATTAATAAATTAAACTACTTGGTTTTCAAAGATATCTCTATTACCGAGAATGGAGGTTTACTG
AAAGGATACCAGTTAACGTATATCCCCGATAAGCTTAAAAACGTGGGCCATCAGTGTGGCTGTATTTTCTATGTGCCCGCGGCA
TATACATCAAAAATTGACCCGACGACGGGTTTCGTTAATATCTTCAAGTTCAAAGATCTGACAGTTGATGCAAAACGCGAATTC
ATTAAGAAGTTCGATAGTATTCGCTATGACTCCGAGAAAAATTTGTTTTGCTTCACTTTTGACTACAATAACTTTATTACTCAG
AATACAGTCATGAGTAAAAGCTCCTGGTCGGTTTACACGTACGGGGTACGCATCAAACGTCGTTTTGTGAATGGTCGTTTTAGT
AATGAGTCGGATACAATTGATATTACCAAGGATATGGAGAAGACTCTGGAAATGACAGACATCAATTGGCGTGATGGACATGAT
TTGCGTCAGGACATTATCGACTATGAGATTGTGCAGCATATTTTCGAAATTTTTCGCCTGACGGTGCAAATGCGTAATTCCTTA
AGCGAACTGGAAGATCGCGACTATGACCGCTTAATTTCTCCTGTGCTGAATGAGAACAACATCTTCTATGACTCAGCGAAAGCC
GGGGACGCTTTGCCAAAGGATGCAGATGCTAACGGTGCATATTGTATTGCTCTGAAAGGCCTTTACGAGATCAAACAAATTACT
GAAAACTGGAAGGAAGATGGAAAGTTTTCCCGTGATAAATTGAAGATCTCTAATAAGGACTGGTTTGACTTTATCCAAAATAAA
CGTTATTTA
ErCas12a-G553M-AA (SEQ ID NO: 104)
MNNGTNNFQNFIGISSLQKTLRNALIPTETTQQFIVKNGIIKEDELRGENRQILKDIMDDYYRGFISETLSSIDDIDWTSLFEK
MEIQLKNGDNKDTLIKEQTEYRKAIHKKFANDDRFKNMFSAKLISDILPEFVIHNNNYSASEKEEKTQVIKLFSRFATSFKDYF
KNRANCESADDISSSSCHRIVNDNAEIFFSNALVYRRIVKSLSNDDINKISGDMKDSLKEMSLEEIYSYEKYGEFITQEGISFY
NDICGKVNSFMNLYCQKNKENKNLYKLQKLHKQILCIADTSYEVPYKFESDEEVYQSVNGELDNISSKHIVERLRKIGDNYNGY
NLDKIYIVSKFYESVSQKTYRDWETINTALEIHYNNILPGNGKSKADKVKKAVKNDLQKSITEINELVSNYKLCSDDNIKAETY
IHEISHILNNFEAQELKYNPEIHLVESELKASELKNVLDVIMNAFHWCSVFMTEELVDKDNNFYAELEEIYDEIYPVISLYNLV
RNYVTQKPYSTKKIKLNFGIPTLADGWSKSKEYSNNAIILMRDNLYYLMIFNAKNKPDKKIIEGNTSENKGDYKKMIYNLLPGP
NKMIPKVFLSSKTGVETYKPSAYILEGYKQNKHIKSSKDFDITFCHDLIDYFKNCIAIHPEWKNFGFDFSDTSTYEDISGFYRE
VELQGYKIDWTYISEKDIDLLQEKGQLYLFQIYNKDFSKKSTGNDNLHTMYLKNLFSEENLKDIVLKLNGEAEIFFRKSSIKNP
IIHKKGSILVNRTYEAEEKDQFGNIQIVRKNIPENIYQELYKYFNDKSDKELSDEAAKLKNVVGHHEAATNIVKDYRYTYDKYF
LHMPITINFKANKTGFINDRILQYIAKEKDLHVIGIDRGERNLIYVSVIDTCGNIVEQKSFNIVNGYDYQIKLKQQEGARQIAR
KEWKEIGKIKEIKEGYLSLVIHEISKMVIKYNAIIAMEDLSYGFKKGRFKVERQVYQKFETMLINKLNYLVFKDISITENGGLL
KGYQLTYIPDKLKNVGHQCGCIFYVPAAYTSKIDPTTGFVNIFKFKDLTVDAKREFIKKFDSIRYDSEKNLFCFTFDYNNFITQ
NTVMSKSSWSVYTYGVRIKRRFVNGRFSNESDTIDITKDMEKTLEMTDINWRDGHDLRQDIIDYEIVQHIFEIFRLTVQMRNSL
SELEDRDYDRLISPVLNENNIFYDSAKAGDALPKDADANGAYCIALKGLYEIKQITENWKEDGKFSRDKLKISNKDWFDFIQNK
RYL
ErCas12a-N556R-NT (SEQ ID NO: 105)
atgAATAACGGTACCAATAACTTTCAAAATTTTATCGGGATCTCCTCGTTGCAAAAAACTCTTCGTAATGCTTTAATCCCGACT
GAGACAACACAGCAGTTCATCGTTAAAAACGGCATCATTAAAGAAGATGAGCTGCGCGGCGAGAACCGTCAGATTTTAAAGGAC
ATCATGGACGACTATTACCGTGGGTTCATCTCAGAAACATTAAGCAGCATCGATGATATCGACTGGACCTCACTGTTTGAGAAG
ATGGAGATTCAACTTAAGAATGGAGACAACAAAGACACTTTAATTAAGGAGCAGACGGAATATCGTAAAGCTATCCATAAAAAA
TTTGCAAACGATGACCGTTTCAAAAATATGTTTTCCGCAAAATTGATTAGCGACATTTTACCTGAATTCGTAATCCATAACAAC
AACTATTCCGCATCTGAAAAAGAGGAGAAGACCCAAGTTATCAAACTTTTTTCACGTTTCGCGACATCTTTTAAAGACTACTTT
AAGAATCGTGCGAATTGTTTCAGTGCAGATGATATTTCGTCTAGTTCATGTCACCGTATCGTGAATGACAACGCTGAGATTTTC
TTTTCTAATGCGTTGGTGTATCGCCGCATCGTAAAGTCCTTGTCGAATGATGATATCAACAAAATTAGTGGTGACATGAAAGAC
TCCCTGAAAGAAATGTCATTAGAGGAGATTTACAGCTACGAAAAATACGGAGAGTTCATCACTCAGGAAGGTATCTCCTTTTAC
AACGATATTTGCGGCAAAGTTAATAGTTTCATGAATCTGTATTGTCAGAAGAATAAGGAAAACAAGAATCTGTACAAGTTACAA
AAGCTTCATAAACAGATCTTGTGCATCGCCGACACGTCTTATGAAGTCCCGTATAAATTTGAAAGCGACGAAGAAGTATATCAG
AGTGTGAATGGATTCTTGGACAATATCTCATCAAAACACATTGTTGAACGTTTGCGCAAAATCGGCGACAACTATAACGGATAC
AACTTGGATAAAATTTATATCGTATCAAAATTTTATGAATCAGTATCCCAAAAGACTTACCGTGATTGGGAGACTATTAATACG
GCGTTAGAAATCCATTACAACAACATTCTGCCGGGTAACGGTAAATCGAAAGCGGACAAAGTGAAGAAGGCGGTTAAGAACGAT
CTTCAGAAGTCTATCACGGAGATTAATGAGCTGGTTTCCAATTACAAGTTGTGCTCGGATGATAACATCAAAGCTGAAACCTAT
ATCCATGAAATTTCTCATATTCTTAATAACTTCGAGGCACAAGAATTAAAATATAACCCAGAAATTCATCTGGTTGAGAGCGAA
CTTAAAGCTTCAGAATTAAAAAATGTTTTGGACGTAATTATGAACGCCTTCCATTGGTGCAGCGTGTTTATGACAGAGGAGTTA
GTAGATAAGGATAACAACTTTTATGCAGAATTGGAAGAGATCTATGATGAGATCTATCCAGTGATTTCACTGTATAACTTAGTC
CGTAATTACGTCACTCAGAAGCCGTACTCAACTAAAAAGATCAAGTTAAATTTTGGAATTCCGACATTGGCGGATGGTTGGAGT
AAGTCTAAGGAATACTCAAATAACGCTATTATCTTAATGCGTGACAACCTGTATTACTTGGGTATTTTCCGTGCCAAAAATAAG
CCCGATAAAAAAATCATTGAAGGGAATACTTCAGAAAATAAGGGAGATTACAAAAAAATGATTTATAACCTTTTGCCAGGCCCA
AACAAAATGATCCCCAAGGTGTTTTTGAGTAGTAAGACGGGAGTAGAAACATATAAGCCATCAGCGTACATTCTTGAAGGGTAC
AAACAAAATAAACACATCAAGAGCAGCAAGGACTTTGACATTACATTTTGTCATGACTTAATCGACTACTTTAAAAATTGCATT
GCCATTCACCCTGAGTGGAAAAATTTTGGTTTCGACTTCAGTGATACCTCTACCTATGAAGATATCTCTGGTTTTTATCGTGAG
GTAGAACTTCAGGGTTACAAGATCGATTGGACGTACATTTCCGAGAAAGACATTGATCTTTTACAAGAGAAGGGTCAGCTTTAC
TTATTTCAGATCTACAATAAAGACTTTTCGAAAAAATCCACGGGCAACGACAACCTTCATACAATGTACTTAAAGAACCTGTTC
TCTGAAGAAAACTTGAAAGATATCGTGCTTAAATTGAATGGCGAGGCCGAGATTTTTTTCCGTAAAAGCTCGATTAAGAATCCC
ATCATCCACAAGAAAGGCAGCATTCTGGTAAATCGTACCTATGAAGCGGAGGAAAAGGACCAATTTGGTAATATTCAGATTGTC
CGTAAGAACATCCCTGAAAATATCTATCAAGAATTATATAAATATTTCAACGATAAGTCGGACAAGGAACTTAGCGATGAAGCC
GCGAAGTTGAAAAATGTTGTTGGTCACCACGAAGCAGCAACAAACATTGTGAAAGACTATCGCTACACTTACGATAAGTACTTT
TTACATATGCCTATTACGATTAACTTTAAGGCAAATAAGACAGGTTTTATCAACGACCGTATCCTGCAATATATTGCAAAAGAG
AAGGACCTGCATGTCATTGGGATTGATCGCGGTGAACGCAATCTGATTTACGTGAGTGTTATTGATACCTGCGGTAATATTGTT
GAGCAAAAGTCTTTTAATATCGTTAATGGTTACGACTACCAAATTAAGCTTAAACAACAGGAAGGTGCCCGCCAGATCGCCCGT
AAGGAGTGGAAGGAAATCGGAAAAATTAAGGAAATCAAAGAGGGATATCTGAGCTTGGTTATTCATGAAATCTCAAAGATGGTT
ATTAAGTACAACGCCATCATCGCTATGGAAGACTTATCGTATGGGTTTAAAAAGGGTCGTTTCAAAGTTGAGCGCCAGGTCTAC
CAAAAGTTTGAAACGATGCTTATTAATAAATTAAACTACTTGGTTTTCAAAGATATCTCTATTACCGAGAATGGAGGTTTACTG
AAAGGATACCAGTTAACGTATATCCCCGATAAGCTTAAAAACGTGGGCCATCAGTGTGGCTGTATTTTCTATGTGCCCGCGGCA
TATACATCAAAAATTGACCCGACGACGGGTTTCGTTAATATCTTCAAGTTCAAAGATCTGACAGTTGATGCAAAACGCGAATTC
ATTAAGAAGTTCGATAGTATTCGCTATGACTCCGAGAAAAATTTGTTTTGCTTCACTTTTGACTACAATAACTTTATTACTCAG
AATACAGTCATGAGTAAAAGCTCCTGGTCGGTTTACACGTACGGGGTACGCATCAAACGTCGTTTTGTGAATGGTCGTTTTAGT
AATGAGTCGGATACAATTGATATTACCAAGGATATGGAGAAGACTCTGGAAATGACAGACATCAATTGGCGTGATGGACATGAT
TTGCGTCAGGACATTATCGACTATGAGATTGTGCAGCATATTTTCGAAATTTTTCGCCTGACGGTGCAAATGCGTAATTCCTTA
AGCGAACTGGAAGATCGCGACTATGACCGCTTAATTTCTCCTGTGCTGAATGAGAACAACATCTTCTATGACTCAGCGAAAGCC
GGGGACGCTTTGCCAAAGGATGCAGATGCTAACGGTGCATATTGTATTGCTCTGAAAGGCCTTTACGAGATCAAACAAATTACT
GAAAACTGGAAGGAAGATGGAAAGTTTTCCCGTGATAAATTGAAGATCTCTAATAAGGACTGGTTTGACTTTATCCAAAATAAA
CGTTATTTA
ErCas12a-N556R-AA (SEQ ID NO: 106)
MNNGTNNFQNFIGISSLQKTLRNALIPTETTQQFIVKNGIIKEDELRGENRQILKDIMDDYYRGFISETLSSIDDIDWTSLFEK
MEIQLKNGDNKDTLIKEQTEYRKAIHKKFANDDRFKNMFSAKLISDILPEFVIHNNNYSASEKEEKTQVIKLESRFATSFKDYF
KNRANCFSADDISSSSCHRIVNDNAEIFFSNALVYRRIVKSLSNDDINKISGDMKDSLKEMSLEEIYSYEKYGEFITQEGISFY
NDICGKVNSFMNLYCQKNKENKNLYKLQKLHKQILCIADTSYEVPYKFESDEEVYQSVNGELDNISSKHIVERLRKIGDNYNGY
NLDKIYIVSKFYESVSQKTYRDWETINTALEIHYNNILPGNGKSKADKVKKAVKNDLQKSITEINELVSNYKLCSDDNIKAETY
IHEISHILNNFEAQELKYNPEIHLVESELKASELKNVLDVIMNAFHWCSVFMTEELVDKDNNFYAELEEIYDEIYPVISLYNLV
RNYVTQKPYSTKKIKLNFGIPTLADGWSKSKEYSNNAIILMRDNLYYLGIFRAKNKPDKKIIEGNTSENKGDYKKMIYNLLPGP
NKMIPKVFLSSKTGVETYKPSAYILEGYKQNKHIKSSKDFDITFCHDLIDYFKNCIAIHPEWKNFGFDFSDTSTYEDISGFYRE
VELQGYKIDWTYISEKDIDLLQEKGQLYLFQIYNKDFSKKSTGNDNLHTMYLKNLFSEENLKDIVLKLNGEAEIFFRKSSIKNP
IIHKKGSILVNRTYEAEEKDQFGNIQIVRKNIPENIYQELYKYFNDKSDKELSDEAAKLKNVVGHHEAATNIVKDYRYTYDKYF
LHMPITINFKANKTGFINDRILQYIAKEKDLHVIGIDRGERNLIYVSVIDTCGNIVEQKSFNIVNGYDYQIKLKQQEGARQIAR
KEWKEIGKIKEIKEGYLSLVIHEISKMVIKYNAIIAMEDLSYGFKKGRFKVERQVYQKFETMLINKLNYLVFKDISITENGGLL
KGYQLTYIPDKLKNVGHQCGCIFYVPAAYTSKIDPTTGFVNIFKFKDLTVDAKREFIKKFDSIRYDSEKNLFCFTEDYNNFITQ
NTVMSKSSWSVYTYGVRIKRRFVNGRFSNESDTIDITKDMEKTLEMTDINWRDGHDLRQDIIDYEIVQHIFEIFRLTVQMRNSL
SELEDRDYDRLISPVLNENNIFYDSAKAGDALPKDADANGAYCIALKGLYEIKQITENWKEDGKFSRDKLKISNKDWFDFIQNK
RYL
ErCas12a-N556E-NT (SEQ ID NO: 107)
atgAATAACGGTACCAATAACTTTCAAAATTTTATCGGGATCTCCTCGTTGCAAAAAACTCTTCGTAATGCTTTAATCCCGACT
GAGACAACACAGCAGTTCATCGTTAAAAACGGCATCATTAAAGAAGATGAGCTGCGCGGCGAGAACCGTCAGATTTTAAAGGAC
ATCATGGACGACTATTACCGTGGGTTCATCTCAGAAACATTAAGCAGCATCGATGATATCGACTGGACCTCACTGTTTGAGAAG
ATGGAGATTCAACTTAAGAATGGAGACAACAAAGACACTTTAATTAAGGAGCAGACGGAATATCGTAAAGCTATCCATAAAAAA
TTTGCAAACGATGACCGTTTCAAAAATATGTTTTCCGCAAAATTGATTAGCGACATTTTACCTGAATTCGTAATCCATAACAAC
AACTATTCCGCATCTGAAAAAGAGGAGAAGACCCAAGTTATCAAACTTTTTTCACGTTTCGCGACATCTTTTAAAGACTACTTT
AAGAATCGTGCGAATTGTTTCAGTGCAGATGATATTTCGTCTAGTTCATGTCACCGTATCGTGAATGACAACGCTGAGATTTTC
TTTTCTAATGCGTTGGTGTATCGCCGCATCGTAAAGTCCTTGTCGAATGATGATATCAACAAAATTAGTGGTGACATGAAAGAC
TCCCTGAAAGAAATGTCATTAGAGGAGATTTACAGCTACGAAAAATACGGAGAGTTCATCACTCAGGAAGGTATCTCCTTTTAC
AACGATATTTGCGGCAAAGTTAATAGTTTCATGAATCTGTATTGTCAGAAGAATAAGGAAAACAAGAATCTGTACAAGTTACAA
AAGCTTCATAAACAGATCTTGTGCATCGCCGACACGTCTTATGAAGTCCCGTATAAATTTGAAAGCGACGAAGAAGTATATCAG
AGTGTGAATGGATTCTTGGACAATATCTCATCAAAACACATTGTTGAACGTTTGCGCAAAATCGGCGACAACTATAACGGATAC
AACTTGGATAAAATTTATATCGTATCAAAATTTTATGAATCAGTATCCCAAAAGACTTACCGTGATTGGGAGACTATTAATACG
GCGTTAGAAATCCATTACAACAACATTCTGCCGGGTAACGGTAAATCGAAAGCGGACAAAGTGAAGAAGGCGGTTAAGAACGAT
CTTCAGAAGTCTATCACGGAGATTAATGAGCTGGTTTCCAATTACAAGTTGTGCTCGGATGATAACATCAAAGCTGAAACCTAT
ATCCATGAAATTTCTCATATTCTTAATAACTTCGAGGCACAAGAATTAAAATATAACCCAGAAATTCATCTGGTTGAGAGCGAA
CTTAAAGCTTCAGAATTAAAAAATGTTTTGGACGTAATTATGAACGCCTTCCATTGGTGCAGCGTGTTTATGACAGAGGAGTTA
GTAGATAAGGATAACAACTTTTATGCAGAATTGGAAGAGATCTATGATGAGATCTATCCAGTGATTTCACTGTATAACTTAGTC
CGTAATTACGTCACTCAGAAGCCGTACTCAACTAAAAAGATCAAGTTAAATTTTGGAATTCCGACATTGGCGGATGGTTGGAGT
AAGTCTAAGGAATACTCAAATAACGCTATTATCTTAATGCGTGACAACCTGTATTACTTGGGTATTTTCGAAGCCAAAAATAAG
CCCGATAAAAAAATCATTGAAGGGAATACTTCAGAAAATAAGGGAGATTACAAAAAAATGATTTATAACCTTTTGCCAGGCCCA
AACAAAATGATCCCCAAGGTGTTTTTGAGTAGTAAGACGGGAGTAGAAACATATAAGCCATCAGCGTACATTCTTGAAGGGTAC
AAACAAAATAAACACATCAAGAGCAGCAAGGACTTTGACATTACATTTTGTCATGACTTAATCGACTACTTTAAAAATTGCATT
GCCATTCACCCTGAGTGGAAAAATTTTGGTTTCGACTTCAGTGATACCTCTACCTATGAAGATATCTCTGGTTTTTATCGTGAG
GTAGAACTTCAGGGTTACAAGATCGATTGGACGTACATTTCCGAGAAAGACATTGATCTTTTACAAGAGAAGGGTCAGCTTTAC
TTATTTCAGATCTACAATAAAGACTTTTCGAAAAAATCCACGGGCAACGACAACCTTCATACAATGTACTTAAAGAACCTGTTC
TCTGAAGAAAACTTGAAAGATATCGTGCTTAAATTGAATGGCGAGGCCGAGATTTTTTTCCGTAAAAGCTCGATTAAGAATCCC
ATCATCCACAAGAAAGGCAGCATTCTGGTAAATCGTACCTATGAAGCGGAGGAAAAGGACCAATTTGGTAATATTCAGATTGTC
CGTAAGAACATCCCTGAAAATATCTATCAAGAATTATATAAATATTTCAACGATAAGTCGGACAAGGAACTTAGCGATGAAGCC
GCGAAGTTGAAAAATGTTGTTGGTCACCACGAAGCAGCAACAAACATTGTGAAAGACTATCGCTACACTTACGATAAGTACTTT
TTACATATGCCTATTACGATTAACTTTAAGGCAAATAAGACAGGTTTTATCAACGACCGTATCCTGCAATATATTGCAAAAGAG
AAGGACCTGCATGTCATTGGGATTGATCGCGGTGAACGCAATCTGATTTACGTGAGTGTTATTGATACCTGCGGTAATATTGTT
GAGCAAAAGTCTTTTAATATCGTTAATGGTTACGACTACCAAATTAAGCTTAAACAACAGGAAGGTGCCCGCCAGATCGCCCGT
AAGGAGTGGAAGGAAATCGGAAAAATTAAGGAAATCAAAGAGGGATATCTGAGCTTGGTTATTCATGAAATCTCAAAGATGGTT
ATTAAGTACAACGCCATCATCGCTATGGAAGACTTATCGTATGGGTTTAAAAAGGGTCGTTTCAAAGTTGAGCGCCAGGTCTAC
CAAAAGTTTGAAACGATGCTTATTAATAAATTAAACTACTTGGTTTTCAAAGATATCTCTATTACCGAGAATGGAGGTTTACTG
AAAGGATACCAGTTAACGTATATCCCCGATAAGCTTAAAAACGTGGGCCATCAGTGTGGCTGTATTTTCTATGTGCCCGCGGCA
TATACATCAAAAATTGACCCGACGACGGGTTTCGTTAATATCTTCAAGTTCAAAGATCTGACAGTTGATGCAAAACGCGAATTC
ATTAAGAAGTTCGATAGTATTCGCTATGACTCCGAGAAAAATTTGTTTTGCTTCACTTTTGACTACAATAACTTTATTACTCAG
AATACAGTCATGAGTAAAAGCTCCTGGTCGGTTTACACGTACGGGGTACGCATCAAACGTCGTTTTGTGAATGGTCGTTTTAGT
AATGAGTCGGATACAATTGATATTACCAAGGATATGGAGAAGACTCTGGAAATGACAGACATCAATTGGCGTGATGGACATGAT
TTGCGTCAGGACATTATCGACTATGAGATTGTGCAGCATATTTTCGAAATTTTTCGCCTGACGGTGCAAATGCGTAATTCCTTA
AGCGAACTGGAAGATCGCGACTATGACCGCTTAATTTCTCCTGTGCTGAATGAGAACAACATCTTCTATGACTCAGCGAAAGCC
GGGGACGCTTTGCCAAAGGATGCAGATGCTAACGGTGCATATTGTATTGCTCTGAAAGGCCTTTACGAGATCAAACAAATTACT
GAAAACTGGAAGGAAGATGGAAAGTTTTCCCGTGATAAATTGAAGATCTCTAATAAGGACTGGTTTGACTTTATCCAAAATAAA
CGTTATTTA
ErCas12a-N556E-AA (SEQ ID NO: 108)
MNNGTNNFQNFIGISSLQKTLRNALIPTETTQQFIVKNGIIKEDELRGENRQILKDIMDDYYRGFISETLSSIDDIDWTSLFEK
MEIQLKNGDNKDTLIKEQTEYRKAIHKKFANDDRFKNMFSAKLISDILPEFVIHNNNYSASEKEEKTQVIKLFSRFATSFKDYF
KNRANCFSADDISSSSCHRIVNDNAEIFFSNALVYRRIVKSLSNDDINKISGDMKDSLKEMSLEEIYSYEKYGEFITQEGISFY
NDICGKVNSFMNLYCQKNKENKNLYKLQKLHKQILCIADTSYEVPYKFESDEEVYQSVNGELDNISSKHIVERLRKIGDNYNGY
NLDKIYIVSKFYESVSQKTYRDWETINTALEIHYNNILPGNGKSKADKVKKAVKNDLQKSITEINELVSNYKLCSDDNIKAETY
IHEISHILNNFEAQELKYNPEIHLVESELKASELKNVLDVIMNAFHWCSVFMTEELVDKDNNFYAELEEIYDEIYPVISLYNLV
RNYVTQKPYSTKKIKLNFGIPTLADGWSKSKEYSNNAIILMRDNLYYLGIFEAKNKPDKKIIEGNTSENKGDYKKMIYNLLPGP
NKMIPKVFLSSKTGVETYKPSAYILEGYKQNKHIKSSKDFDITFCHDLIDYFKNCIAIHPEWKNFGFDFSDTSTYEDISGFYRE
VELQGYKIDWTYISEKDIDLLQEKGQLYLFQIYNKDFSKKSTGNDNLHTMYLKNLFSEENLKDIVLKLNGEAEIFFRKSSIKNP
IIHKKGSILVNRTYEAEEKDQFGNIQIVRKNIPENIYQELYKYFNDKSDKELSDEAAKLKNVVGHHEAATNIVKDYRYTYDKYF
LHMPITINFKANKTGFINDRILQYIAKEKDLHVIGIDRGERNLIYVSVIDTCGNIVEQKSFNIVNGYDYQIKLKQQEGARQIAR
KEWKEIGKIKEIKEGYLSLVIHEISKMVIKYNAIIAMEDLSYGFKKGRFKVERQVYQKFETMLINKLNYLVFKDISITENGGLL
KGYQLTYIPDKLKNVGHQCGCIFYVPAAYTSKIDPTTGFVNIFKFKDLTVDAKREFIKKFDSIRYDSEKNLFCFTFDYNNFITQ
NTVMSKSSWSVYTYGVRIKRRFVNGRFSNESDTIDITKDMEKTLEMTDINWRDGHDLRQDIIDYEIVQHIFEIFRLTVQMRNSL
SELEDRDYDRLISPVLNENNIFYDSAKAGDALPKDADANGAYCIALKGLYEIKQITENWKEDGKFSRDKLKISNKDWEDFIQNK
RYL
ErCas12a-D562V-NT (SEQ ID NO: 109)
atgAATAACGGTACCAATAACTTTCAAAATTTTATCGGGATCTCCTCGTTGCAAAAAACTCTTCGTAATGCTTTAATCCCGACT
GAGACAACACAGCAGTTCATCGTTAAAAACGGCATCATTAAAGAAGATGAGCTGCGCGGCGAGAACCGTCAGATTTTAAAGGAC
ATCATGGACGACTATTACCGTGGGTTCATCTCAGAAACATTAAGCAGCATCGATGATATCGACTGGACCTCACTGTTTGAGAAG
ATGGAGATTCAACTTAAGAATGGAGACAACAAAGACACTTTAATTAAGGAGCAGACGGAATATCGTAAAGCTATCCATAAAAAA
TTTGCAAACGATGACCGTTTCAAAAATATGTTTTCCGCAAAATTGATTAGCGACATTTTACCTGAATTCGTAATCCATAACAAC
AACTATTCCGCATCTGAAAAAGAGGAGAAGACCCAAGTTATCAAACTTTTTTCACGTTTCGCGACATCTTTTAAAGACTACTTT
AAGAATCGTGCGAATTGTTTCAGTGCAGATGATATTTCGTCTAGTTCATGTCACCGTATCGTGAATGACAACGCTGAGATTTTC
TTTTCTAATGCGTTGGTGTATCGCCGCATCGTAAAGTCCTTGTCGAATGATGATATCAACAAAATTAGTGGTGACATGAAAGAC
TCCCTGAAAGAAATGTCATTAGAGGAGATTTACAGCTACGAAAAATACGGAGAGTTCATCACTCAGGAAGGTATCTCCTTTTAC
AACGATATTTGCGGCAAAGTTAATAGTTTCATGAATCTGTATTGTCAGAAGAATAAGGAAAACAAGAATCTGTACAAGTTACAA
AAGCTTCATAAACAGATCTTGTGCATCGCCGACACGTCTTATGAAGTCCCGTATAAATTTGAAAGCGACGAAGAAGTATATCAG
AGTGTGAATGGATTCTTGGACAATATCTCATCAAAACACATTGTTGAACGTTTGCGCAAAATCGGCGACAACTATAACGGATAC
AACTTGGATAAAATTTATATCGTATCAAAATTTTATGAATCAGTATCCCAAAAGACTTACCGTGATTGGGAGACTATTAATACG
GCGTTAGAAATCCATTACAACAACATTCTGCCGGGTAACGGTAAATCGAAAGCGGACAAAGTGAAGAAGGCGGTTAAGAACGAT
CTTCAGAAGTCTATCACGGAGATTAATGAGCTGGTTTCCAATTACAAGTTGTGCTCGGATGATAACATCAAAGCTGAAACCTAT
ATCCATGAAATTTCTCATATTCTTAATAACTTCGAGGCACAAGAATTAAAATATAACCCAGAAATTCATCTGGTTGAGAGCGAA
CTTAAAGCTTCAGAATTAAAAAATGTTTTGGACGTAATTATGAACGCCTTCCATTGGTGCAGCGTGTTTATGACAGAGGAGTTA
GTAGATAAGGATAACAACTTTTATGCAGAATTGGAAGAGATCTATGATGAGATCTATCCAGTGATTTCACTGTATAACTTAGTC
CGTAATTACGTCACTCAGAAGCCGTACTCAACTAAAAAGATCAAGTTAAATTTTGGAATTCCGACATTGGCGGATGGTTGGAGT
AAGTCTAAGGAATACTCAAATAACGCTATTATCTTAATGCGTGACAACCTGTATTACTTGGGTATTTTCAATGCCAAAAATAAG
CCCGTGAAAAAAATCATTGAAGGGAATACTTCAGAAAATAAGGGAGATTACAAAAAAATGATTTATAACCTTTTGCCAGGCCCA
AACAAAATGATCCCCAAGGTGTTTTTGAGTAGTAAGACGGGAGTAGAAACATATAAGCCATCAGCGTACATTCTTGAAGGGTAC
AAACAAAATAAACACATCAAGAGCAGCAAGGACTTTGACATTACATTTTGTCATGACTTAATCGACTACTTTAAAAATTGCATT
GCCATTCACCCTGAGTGGAAAAATTTTGGTTTCGACTTCAGTGATACCTCTACCTATGAAGATATCTCTGGTTTTTATCGTGAG
GTAGAACTTCAGGGTTACAAGATCGATTGGACGTACATTTCCGAGAAAGACATTGATCTTTTACAAGAGAAGGGTCAGCTTTAC
TTATTTCAGATCTACAATAAAGACTTTTCGAAAAAATCCACGGGCAACGACAACCTTCATACAATGTACTTAAAGAACCTGTTC
TCTGAAGAAAACTTGAAAGATATCGTGCTTAAATTGAATGGCGAGGCCGAGATTTTTTTCCGTAAAAGCTCGATTAAGAATCCC
ATCATCCACAAGAAAGGCAGCATTCTGGTAAATCGTACCTATGAAGCGGAGGAAAAGGACCAATTTGGTAATATTCAGATTGTC
CGTAAGAACATCCCTGAAAATATCTATCAAGAATTATATAAATATTTCAACGATAAGTCGGACAAGGAACTTAGCGATGAAGCC
GCGAAGTTGAAAAATGTTGTTGGTCACCACGAAGCAGCAACAAACATTGTGAAAGACTATCGCTACACTTACGATAAGTACTTT
TTACATATGCCTATTACGATTAACTTTAAGGCAAATAAGACAGGTTTTATCAACGACCGTATCCTGCAATATATTGCAAAAGAG
AAGGACCTGCATGTCATTGGGATTGATCGCGGTGAACGCAATCTGATTTACGTGAGTGTTATTGATACCTGCGGTAATATTGTT
GAGCAAAAGTCTTTTAATATCGTTAATGGTTACGACTACCAAATTAAGCTTAAACAACAGGAAGGTGCCCGCCAGATCGCCCGT
AAGGAGTGGAAGGAAATCGGAAAAATTAAGGAAATCAAAGAGGGATATCTGAGCTTGGTTATTCATGAAATCTCAAAGATGGTT
ATTAAGTACAACGCCATCATCGCTATGGAAGACTTATCGTATGGGTTTAAAAAGGGTCGTTTCAAAGTTGAGCGCCAGGTCTAC
CAAAAGTTTGAAACGATGCTTATTAATAAATTAAACTACTTGGTTTTCAAAGATATCTCTATTACCGAGAATGGAGGTTTACTG
AAAGGATACCAGTTAACGTATATCCCCGATAAGCTTAAAAACGTGGGCCATCAGTGTGGCTGTATTTTCTATGTGCCCGCGGCA
TATACATCAAAAATTGACCCGACGACGGGTTTCGTTAATATCTTCAAGTTCAAAGATCTGACAGTTGATGCAAAACGCGAATTC
ATTAAGAAGTTCGATAGTATTCGCTATGACTCCGAGAAAAATTTGTTTTGCTTCACTTTTGACTACAATAACTTTATTACTCAG
AATACAGTCATGAGTAAAAGCTCCTGGTCGGTTTACACGTACGGGGTACGCATCAAACGTCGTTTTGTGAATGGTCGTTTTAGT
AATGAGTCGGATACAATTGATATTACCAAGGATATGGAGAAGACTCTGGAAATGACAGACATCAATTGGCGTGATGGACATGAT
TTGCGTCAGGACATTATCGACTATGAGATTGTGCAGCATATTTTCGAAATTTTTCGCCTGACGGTGCAAATGCGTAATTCCTTA
AGCGAACTGGAAGATCGCGACTATGACCGCTTAATTTCTCCTGTGCTGAATGAGAACAACATCTTCTATGACTCAGCGAAAGCC
GGGGACGCTTTGCCAAAGGATGCAGATGCTAACGGTGCATATTGTATTGCTCTGAAAGGCCTTTACGAGATCAAACAAATTACT
GAAAACTGGAAGGAAGATGGAAAGTTTTCCCGTGATAAATTGAAGATCTCTAATAAGGACTGGTTTGACTTTATCCAAAATAAA
CGTTATTTA
ErCas12a-D562V-AA (SEQ ID NO: 110)
MNNGTNNFQNFIGISSLQKTLRNALIPTETTQQFIVKNGIIKEDELRGENRQILKDIMDDYYRGFISETLSSIDDIDWTSLFEK
MEIQLKNGDNKDTLIKEQTEYRKAIHKKFANDDRFKNMFSAKLISDILPEFVIHNNNYSASEKEEKTQVIKLFSRFATSFKDYF
KNRANCESADDISSSSCHRIVNDNAEIFFSNALVYRRIVKSLSNDDINKISGDMKDSLKEMSLEEIYSYEKYGEFITQEGISFY
NDICGKVNSFMNLYCQKNKENKNLYKLQKLHKQILCIADTSYEVPYKFESDEEVYQSVNGFLDNISSKHIVERLRKIGDNYNGY
NLDKIYIVSKFYESVSQKTYRDWETINTALEIHYNNILPGNGKSKADKVKKAVKNDLQKSITEINELVSNYKLCSDDNIKAETY
IHEISHILNNFEAQELKYNPEIHLVESELKASELKNVLDVIMNAFHWCSVFMTEELVDKDNNFYAELEEIYDEIYPVISLYNLV
RNYVTQKPYSTKKIKLNFGIPTLADGWSKSKEYSNNAIILMRDNLYYLGIFNAKNKPVKKIIEGNTSENKGDYKKMIYNLLPGP
NKMIPKVFLSSKTGVETYKPSAYILEGYKQNKHIKSSKDFDITFCHDLIDYFKNCIAIHPEWKNFGFDFSDTSTYEDISGFYRE
VELQGYKIDWTYISEKDIDLLQEKGQLYLFQIYNKDFSKKSTGNDNLHTMYLKNLFSEENLKDIVLKLNGEAEIFFRKSSIKNP
IIHKKGSILVNRTYEAEEKDQFGNIQIVRKNIPENIYQELYKYFNDKSDKELSDEAAKLKNVVGHHEAATNIVKDYRYTYDKYF
LHMPITINFKANKTGFINDRILQYIAKEKDLHVIGIDRGERNLIYVSVIDTCGNIVEQKSFNIVNGYDYQIKLKQQEGARQIAR
KEWKEIGKIKEIKEGYLSLVIHEISKMVIKYNAIIAMEDLSYGFKKGRFKVERQVYQKFETMLINKLNYLVFKDISITENGGLL
KGYQLTYIPDKLKNVGHQCGCIFYVPAAYTSKIDPTTGFVNIFKFKDLTVDAKREFIKKFDSIRYDSEKNLFCFTFDYNNFITQ
NTVMSKSSWSVYTYGVRIKRRFVNGRFSNESDTIDITKDMEKTLEMTDINWRDGHDLRQDIIDYEIVQHIFEIFRLTVQMRNSL
SELEDRDYDRLISPVLNENNIFYDSAKAGDALPKDADANGAYCIALKGLYEIKQITENWKEDGKFSRDKLKISNKDWFDFIQNK
RYL
ErCas12a-D562K-NT (SEQ ID NO: 111)
atgAATAACGGTACCAATAACTTTCAAAATTTTATCGGGATCTCCTCGTTGCAAAAAACTCTTCGTAATGCTTTAATCCCGACT
GAGACAACACAGCAGTTCATCGTTAAAAACGGCATCATTAAAGAAGATGAGCTGCGCGGCGAGAACCGTCAGATTTTAAAGGAC
ATCATGGACGACTATTACCGTGGGTTCATCTCAGAAACATTAAGCAGCATCGATGATATCGACTGGACCTCACTGTTTGAGAAG
ATGGAGATTCAACTTAAGAATGGAGACAACAAAGACACTTTAATTAAGGAGCAGACGGAATATCGTAAAGCTATCCATAAAAAA
TTTGCAAACGATGACCGTTTCAAAAATATGTTTTCCGCAAAATTGATTAGCGACATTTTACCTGAATTCGTAATCCATAACAAC
AACTATTCCGCATCTGAAAAAGAGGAGAAGACCCAAGTTATCAAACTTTTTTCACGTTTCGCGACATCTTTTAAAGACTACTTT
AAGAATCGTGCGAATTGTTTCAGTGCAGATGATATTTCGTCTAGTTCATGTCACCGTATCGTGAATGACAACGCTGAGATTTTC
TTTTCTAATGCGTTGGTGTATCGCCGCATCGTAAAGTCCTTGTCGAATGATGATATCAACAAAATTAGTGGTGACATGAAAGAC
TCCCTGAAAGAAATGTCATTAGAGGAGATTTACAGCTACGAAAAATACGGAGAGTTCATCACTCAGGAAGGTATCTCCTTTTAC
AACGATATTTGCGGCAAAGTTAATAGTTTCATGAATCTGTATTGTCAGAAGAATAAGGAAAACAAGAATCTGTACAAGTTACAA
AAGCTTCATAAACAGATCTTGTGCATCGCCGACACGTCTTATGAAGTCCCGTATAAATTTGAAAGCGACGAAGAAGTATATCAG
AGTGTGAATGGATTCTTGGACAATATCTCATCAAAACACATTGTTGAACGTTTGCGCAAAATCGGCGACAACTATAACGGATAC
AACTTGGATAAAATTTATATCGTATCAAAATTTTATGAATCAGTATCCCAAAAGACTTACCGTGATTGGGAGACTATTAATACG
GCGTTAGAAATCCATTACAACAACATTCTGCCGGGTAACGGTAAATCGAAAGCGGACAAAGTGAAGAAGGCGGTTAAGAACGAT
CTTCAGAAGTCTATCACGGAGATTAATGAGCTGGTTTCCAATTACAAGTTGTGCTCGGATGATAACATCAAAGCTGAAACCTAT
ATCCATGAAATTTCTCATATTCTTAATAACTTCGAGGCACAAGAATTAAAATATAACCCAGAAATTCATCTGGTTGAGAGCGAA
CTTAAAGCTTCAGAATTAAAAAATGTTTTGGACGTAATTATGAACGCCTTCCATTGGTGCAGCGTGTTTATGACAGAGGAGTTA
GTAGATAAGGATAACAACTTTTATGCAGAATTGGAAGAGATCTATGATGAGATCTATCCAGTGATTTCACTGTATAACTTAGTC
CGTAATTACGTCACTCAGAAGCCGTACTCAACTAAAAAGATCAAGTTAAATTTTGGAATTCCGACATTGGCGGATGGTTGGAGT
AAGTCTAAGGAATACTCAAATAACGCTATTATCTTAATGCGTGACAACCTGTATTACTTGGGTATTTTCAATGCCAAAAATAAG
CCCAAAAAAAAAATCATTGAAGGGAATACTTCAGAAAATAAGGGAGATTACAAAAAAATGATTTATAACCTTTTGCCAGGCCCA
AACAAAATGATCCCCAAGGTGTTTTTGAGTAGTAAGACGGGAGTAGAAACATATAAGCCATCAGCGTACATTCTTGAAGGGTAC
AAACAAAATAAACACATCAAGAGCAGCAAGGACTTTGACATTACATTTTGTCATGACTTAATCGACTACTTTAAAAATTGCATT
GCCATTCACCCTGAGTGGAAAAATTTTGGTTTCGACTTCAGTGATACCTCTACCTATGAAGATATCTCTGGTTTTTATCGTGAG
GTAGAACTTCAGGGTTACAAGATCGATTGGACGTACATTTCCGAGAAAGACATTGATCTTTTACAAGAGAAGGGTCAGCTTTAC
TTATTTCAGATCTACAATAAAGACTTTTCGAAAAAATCCACGGGCAACGACAACCTTCATACAATGTACTTAAAGAACCTGTTC
TCTGAAGAAAACTTGAAAGATATCGTGCTTAAATTGAATGGCGAGGCCGAGATTTTTTTCCGTAAAAGCTCGATTAAGAATCCC
ATCATCCACAAGAAAGGCAGCATTCTGGTAAATCGTACCTATGAAGCGGAGGAAAAGGACCAATTTGGTAATATTCAGATTGTC
CGTAAGAACATCCCTGAAAATATCTATCAAGAATTATATAAATATTTCAACGATAAGTCGGACAAGGAACTTAGCGATGAAGCC
GCGAAGTTGAAAAATGTTGTTGGTCACCACGAAGCAGCAACAAACATTGTGAAAGACTATCGCTACACTTACGATAAGTACTTT
TTACATATGCCTATTACGATTAACTTTAAGGCAAATAAGACAGGTTTTATCAACGACCGTATCCTGCAATATATTGCAAAAGAG
AAGGACCTGCATGTCATTGGGATTGATCGCGGTGAACGCAATCTGATTTACGTGAGTGTTATTGATACCTGCGGTAATATTGTT
GAGCAAAAGTCTTTTAATATCGTTAATGGTTACGACTACCAAATTAAGCTTAAACAACAGGAAGGTGCCCGCCAGATCGCCCGT
AAGGAGTGGAAGGAAATCGGAAAAATTAAGGAAATCAAAGAGGGATATCTGAGCTTGGTTATTCATGAAATCTCAAAGATGGTT
ATTAAGTACAACGCCATCATCGCTATGGAAGACTTATCGTATGGGTTTAAAAAGGGTCGTTTCAAAGTTGAGCGCCAGGTCTAC
CAAAAGTTTGAAACGATGCTTATTAATAAATTAAACTACTTGGTTTTCAAAGATATCTCTATTACCGAGAATGGAGGTTTACTG
AAAGGATACCAGTTAACGTATATCCCCGATAAGCTTAAAAACGTGGGCCATCAGTGTGGCTGTATTTTCTATGTGCCCGCGGCA
TATACATCAAAAATTGACCCGACGACGGGTTTCGTTAATATCTTCAAGTTCAAAGATCTGACAGTTGATGCAAAACGCGAATTC
ATTAAGAAGTTCGATAGTATTCGCTATGACTCCGAGAAAAATTTGTTTTGCTTCACTTTTGACTACAATAACTTTATTACTCAG
AATACAGTCATGAGTAAAAGCTCCTGGTCGGTTTACACGTACGGGGTACGCATCAAACGTCGTTTTGTGAATGGTCGTTTTAGT
AATGAGTCGGATACAATTGATATTACCAAGGATATGGAGAAGACTCTGGAAATGACAGACATCAATTGGCGTGATGGACATGAT
TTGCGTCAGGACATTATCGACTATGAGATTGTGCAGCATATTTTCGAAATTTTTCGCCTGACGGTGCAAATGCGTAATTCCTTA
AGCGAACTGGAAGATCGCGACTATGACCGCTTAATTTCTCCTGTGCTGAATGAGAACAACATCTTCTATGACTCAGCGAAAGCC
GGGGACGCTTTGCCAAAGGATGCAGATGCTAACGGTGCATATTGTATTGCTCTGAAAGGCCTTTACGAGATCAAACAAATTACT
GAAAACTGGAAGGAAGATGGAAAGTTTTCCCGTGATAAATTGAAGATCTCTAATAAGGACTGGTTTGACTTTATCCAAAATAAA
CGTTATTTA
ErCas12a-D562K-AA (SEQ ID NO: 112)
MNNGTNNFQNFIGISSLQKTLRNALIPTETTQQFIVKNGIIKEDELRGENRQILKDIMDDYYRGFISETLSSIDDIDWTSLFEK
MEIQLKNGDNKDTLIKEQTEYRKAIHKKFANDDRFKNMFSAKLISDILPEFVIHNNNYSASEKEEKTQVIKLFSRFATSFKDYF
KNRANCFSADDISSSSCHRIVNDNAEIFFSNALVYRRIVKSLSNDDINKISGDMKDSLKEMSLEEIYSYEKYGEFITQEGISFY
NDICGKVNSFMNLYCQKNKENKNLYKLQKLHKQILCIADTSYEVPYKFESDEEVYQSVNGFLDNISSKHIVERLRKIGDNYNGY
NLDKIYIVSKFYESVSQKTYRDWETINTALEIHYNNILPGNGKSKADKVKKAVKNDLQKSITEINELVSNYKLCSDDNIKAETY
IHEISHILNNFEAQELKYNPEIHLVESELKASELKNVLDVIMNAFHWCSVFMTEELVDKDNNFYAELEEIYDEIYPVISLYNLV
RNYVTQKPYSTKKIKLNFGIPTLADGWSKSKEYSNNAIILMRDNLYYLGIFNAKNKPKKKIIEGNTSENKGDYKKMIYNLLPGP
NKMIPKVFLSSKTGVETYKPSAYILEGYKQNKHIKSSKDFDITFCHDLIDYFKNCIAIHPEWKNFGFDFSDTSTYEDISGFYRE
VELQGYKIDWTYISEKDIDLLQEKGQLYLFQIYNKDFSKKSTGNDNLHTMYLKNLFSEENLKDIVLKLNGEAEIFFRKSSIKNP
IIHKKGSILVNRTYEAEEKDQFGNIQIVRKNIPENIYQELYKYFNDKSDKELSDEAAKLKNVVGHHEAATNIVKDYRYTYDKYF
LHMPITINFKANKTGFINDRILQYIAKEKDLHVIGIDRGERNLIYVSVIDTCGNIVEQKSFNIVNGYDYQIKLKQQEGARQIAR
KEWKEIGKIKEIKEGYLSLVIHEISKMVIKYNAIIAMEDLSYGFKKGRFKVERQVYQKFETMLINKLNYLVFKDISITENGGLL
KGYQLTYIPDKLKNVGHQCGCIFYVPAAYTSKIDPTTGFVNIFKFKDLTVDAKREFIKKFDSIRYDSEKNLFCFTFDYNNFITQ
NTVMSKSSWSVYTYGVRIKRRFVNGRFSNESDTIDITKDMEKTLEMTDINWRDGHDLRQDIIDYEIVQHIFEIFRLTVQMRNSL
SELEDRDYDRLISPVLNENNIFYDSAKAGDALPKDADANGAYCIALKGLYEIKQITENWKEDGKFSRDKLKISNKDWFDFIQNK
RYL
ErCas12a-D562I-NT (SEQ ID NO: 113)
atgAATAACGGTACCAATAACTTTCAAAATTTTATCGGGATCTCCTCGTTGCAAAAAACTCTTCGTAATGCTTTAATCCCGACT
GAGACAACACAGCAGTTCATCGTTAAAAACGGCATCATTAAAGAAGATGAGCTGCGCGGCGAGAACCGTCAGATTTTAAAGGAC
ATCATGGACGACTATTACCGTGGGTTCATCTCAGAAACATTAAGCAGCATCGATGATATCGACTGGACCTCACTGTTTGAGAAG
ATGGAGATTCAACTTAAGAATGGAGACAACAAAGACACTTTAATTAAGGAGCAGACGGAATATCGTAAAGCTATCCATAAAAAA
TTTGCAAACGATGACCGTTTCAAAAATATGTTTTCCGCAAAATTGATTAGCGACATTTTACCTGAATTCGTAATCCATAACAAC
AACTATTCCGCATCTGAAAAAGAGGAGAAGACCCAAGTTATCAAACTTTTTTCACGTTTCGCGACATCTTTTAAAGACTACTTT
AAGAATCGTGCGAATTGTTTCAGTGCAGATGATATTTCGTCTAGTTCATGTCACCGTATCGTGAATGACAACGCTGAGATTTTC
TTTTCTAATGCGTTGGTGTATCGCCGCATCGTAAAGTCCTTGTCGAATGATGATATCAACAAAATTAGTGGTGACATGAAAGAC
TCCCTGAAAGAAATGTCATTAGAGGAGATTTACAGCTACGAAAAATACGGAGAGTTCATCACTCAGGAAGGTATCTCCTTTTAC
AACGATATTTGCGGCAAAGTTAATAGTTTCATGAATCTGTATTGTCAGAAGAATAAGGAAAACAAGAATCTGTACAAGTTACAA
AAGCTTCATAAACAGATCTTGTGCATCGCCGACACGTCTTATGAAGTCCCGTATAAATTTGAAAGCGACGAAGAAGTATATCAG
AGTGTGAATGGATTCTTGGACAATATCTCATCAAAACACATTGTTGAACGTTTGCGCAAAATCGGCGACAACTATAACGGATAC
AACTTGGATAAAATTTATATCGTATCAAAATTTTATGAATCAGTATCCCAAAAGACTTACCGTGATTGGGAGACTATTAATACG
GCGTTAGAAATCCATTACAACAACATTCTGCCGGGTAACGGTAAATCGAAAGCGGACAAAGTGAAGAAGGCGGTTAAGAACGAT
CTTCAGAAGTCTATCACGGAGATTAATGAGCTGGTTTCCAATTACAAGTTGTGCTCGGATGATAACATCAAAGCTGAAACCTAT
ATCCATGAAATTTCTCATATTCTTAATAACTTCGAGGCACAAGAATTAAAATATAACCCAGAAATTCATCTGGTTGAGAGCGAA
CTTAAAGCTTCAGAATTAAAAAATGTTTTGGACGTAATTATGAACGCCTTCCATTGGTGCAGCGTGTTTATGACAGAGGAGTTA
GTAGATAAGGATAACAACTTTTATGCAGAATTGGAAGAGATCTATGATGAGATCTATCCAGTGATTTCACTGTATAACTTAGTC
CGTAATTACGTCACTCAGAAGCCGTACTCAACTAAAAAGATCAAGTTAAATTTTGGAATTCCGACATTGGCGGATGGTTGGAGT
AAGTCTAAGGAATACTCAAATAACGCTATTATCTTAATGCGTGACAACCTGTATTACTTGGGTATTTTCAATGCCAAAAATAAG
CCCATTAAAAAAATCATTGAAGGGAATACTTCAGAAAATAAGGGAGATTACAAAAAAATGATTTATAACCTTTTGCCAGGCCCA
AACAAAATGATCCCCAAGGTGTTTTTGAGTAGTAAGACGGGAGTAGAAACATATAAGCCATCAGCGTACATTCTTGAAGGGTAC
AAACAAAATAAACACATCAAGAGCAGCAAGGACTTTGACATTACATTTTGTCATGACTTAATCGACTACTTTAAAAATTGCATT
GCCATTCACCCTGAGTGGAAAAATTTTGGTTTCGACTTCAGTGATACCTCTACCTATGAAGATATCTCTGGTTTTTATCGTGAG
GTAGAACTTCAGGGTTACAAGATCGATTGGACGTACATTTCCGAGAAAGACATTGATCTTTTACAAGAGAAGGGTCAGCTTTAC
TTATTTCAGATCTACAATAAAGACTTTTCGAAAAAATCCACGGGCAACGACAACCTTCATACAATGTACTTAAAGAACCTGTTC
TCTGAAGAAAACTTGAAAGATATCGTGCTTAAATTGAATGGCGAGGCCGAGATTTTTTTCCGTAAAAGCTCGATTAAGAATCCC
ATCATCCACAAGAAAGGCAGCATTCTGGTAAATCGTACCTATGAAGCGGAGGAAAAGGACCAATTTGGTAATATTCAGATTGTC
CGTAAGAACATCCCTGAAAATATCTATCAAGAATTATATAAATATTTCAACGATAAGTCGGACAAGGAACTTAGCGATGAAGCC
GCGAAGTTGAAAAATGTTGTTGGTCACCACGAAGCAGCAACAAACATTGTGAAAGACTATCGCTACACTTACGATAAGTACTTT
TTACATATGCCTATTACGATTAACTTTAAGGCAAATAAGACAGGTTTTATCAACGACCGTATCCTGCAATATATTGCAAAAGAG
AAGGACCTGCATGTCATTGGGATTGATCGCGGTGAACGCAATCTGATTTACGTGAGTGTTATTGATACCTGCGGTAATATTGTT
GAGCAAAAGTCTTTTAATATCGTTAATGGTTACGACTACCAAATTAAGCTTAAACAACAGGAAGGTGCCCGCCAGATCGCCCGT
AAGGAGTGGAAGGAAATCGGAAAAATTAAGGAAATCAAAGAGGGATATCTGAGCTTGGTTATTCATGAAATCTCAAAGATGGTT
ATTAAGTACAACGCCATCATCGCTATGGAAGACTTATCGTATGGGTTTAAAAAGGGTCGTTTCAAAGTTGAGCGCCAGGTCTAC
CAAAAGTTTGAAACGATGCTTATTAATAAATTAAACTACTTGGTTTTCAAAGATATCTCTATTACCGAGAATGGAGGTTTACTG
AAAGGATACCAGTTAACGTATATCCCCGATAAGCTTAAAAACGTGGGCCATCAGTGTGGCTGTATTTTCTATGTGCCCGCGGCA
TATACATCAAAAATTGACCCGACGACGGGTTTCGTTAATATCTTCAAGTTCAAAGATCTGACAGTTGATGCAAAACGCGAATTC
ATTAAGAAGTTCGATAGTATTCGCTATGACTCCGAGAAAAATTTGTTTTGCTTCACTTTTGACTACAATAACTTTATTACTCAG
AATACAGTCATGAGTAAAAGCTCCTGGTCGGTTTACACGTACGGGGTACGCATCAAACGTCGTTTTGTGAATGGTCGTTTTAGT
AATGAGTCGGATACAATTGATATTACCAAGGATATGGAGAAGACTCTGGAAATGACAGACATCAATTGGCGTGATGGACATGAT
TTGCGTCAGGACATTATCGACTATGAGATTGTGCAGCATATTTTCGAAATTTTTCGCCTGACGGTGCAAATGCGTAATTCCTTA
AGCGAACTGGAAGATCGCGACTATGACCGCTTAATTTCTCCTGTGCTGAATGAGAACAACATCTTCTATGACTCAGCGAAAGCC
GGGGACGCTTTGCCAAAGGATGCAGATGCTAACGGTGCATATTGTATTGCTCTGAAAGGCCTTTACGAGATCAAACAAATTACT
GAAAACTGGAAGGAAGATGGAAAGTTTTCCCGTGATAAATTGAAGATCTCTAATAAGGACTGGTTTGACTTTATCCAAAATAAA
CGTTATTTA
ErCas12a-D562I-AA (SEQ ID NO: 114)
MNNGTNNFQNFIGISSLQKTLRNALIPTETTQQFIVKNGIIKEDELRGENRQILKDIMDDYYRGFISETLSSIDDIDWTSLFEK
MEIQLKNGDNKDTLIKEQTEYRKAIHKKFANDDRFKNMFSAKLISDILPEFVIHNNNYSASEKEEKTQVIKLFSRFATSFKDYF
KNRANCFSADDISSSSCHRIVNDNAEIFFSNALVYRRIVKSLSNDDINKISGDMKDSLKEMSLEEIYSYEKYGEFITQEGISFY
NDICGKVNSFMNLYCQKNKENKNLYKLQKLHKQILCIADTSYEVPYKFESDEEVYQSVNGFLDNISSKHIVERLRKIGDNYNGY
NLDKIYIVSKFYESVSQKTYRDWETINTALEIHYNNILPGNGKSKADKVKKAVKNDLQKSITEINELVSNYKLCSDDNIKAETY
IHEISHILNNFEAQELKYNPEIHLVESELKASELKNVLDVIMNAFHWCSVFMTEELVDKDNNFYAELEEIYDEIYPVISLYNLV
RNYVTQKPYSTKKIKLNFGIPTLADGWSKSKEYSNNAIILMRDNLYYLGIFNAKNKPIKKIIEGNTSENKGDYKKMIYNLLPGP
NKMIPKVFLSSKTGVETYKPSAYILEGYKQNKHIKSSKDFDITFCHDLIDYFKNCIAIHPEWKNFGFDFSDTSTYEDISGFYRE
VELQGYKIDWTYISEKDIDLLQEKGQLYLFQIYNKDFSKKSTGNDNLHTMYLKNLFSEENLKDIVLKLNGEAEIFFRKSSIKNP
IIHKKGSILVNRTYEAEEKDQFGNIQIVRKNIPENIYQELYKYFNDKSDKELSDEAAKLKNVVGHHEAATNIVKDYRYTYDKYF
LHMPITINFKANKTGFINDRILQYIAKEKDLHVIGIDRGERNLIYVSVIDTCGNIVEQKSFNIVNGYDYQIKLKQQEGARQIAR
KEWKEIGKIKEIKEGYLSLVIHEISKMVIKYNAIIAMEDLSYGFKKGRFKVERQVYQKFETMLINKLNYLVFKDISITENGGLL
KGYQLTYIPDKLKNVGHQCGCIFYVPAAYTSKIDPTTGFVNIFKFKDLTVDAKREFIKKFDSIRYDSEKNLFCFTEDYNNFITQ
NTVMSKSSWSVYTYGVRIKRRFVNGRFSNESDTIDITKDMEKTLEMTDINWRDGHDLRQDIIDYEIVQHIFEIFRLTVQMRNSL
SELEDRDYDRLISPVLNENNIFYDSAKAGDALPKDADANGAYCIALKGLYEIKQITENWKEDGKFSRDKLKISNKDWFDFIQNK
RYL
ErCas12a-N583V-NT (SEQ ID NO: 115)
atgAATAACGGTACCAATAACTTTCAAAATTTTATCGGGATCTCCTCGTTGCAAAAAACTCTTCGTAATGCTTTAATCCCGACT
GAGACAACACAGCAGTTCATCGTTAAAAACGGCATCATTAAAGAAGATGAGCTGCGCGGCGAGAACCGTCAGATTTTAAAGGAC
ATCATGGACGACTATTACCGTGGGTTCATCTCAGAAACATTAAGCAGCATCGATGATATCGACTGGACCTCACTGTTTGAGAAG
ATGGAGATTCAACTTAAGAATGGAGACAACAAAGACACTTTAATTAAGGAGCAGACGGAATATCGTAAAGCTATCCATAAAAAA
TTTGCAAACGATGACCGTTTCAAAAATATGTTTTCCGCAAAATTGATTAGCGACATTTTACCTGAATTCGTAATCCATAACAAC
AACTATTCCGCATCTGAAAAAGAGGAGAAGACCCAAGTTATCAAACTTTTTTCACGTTTCGCGACATCTTTTAAAGACTACTTT
AAGAATCGTGCGAATTGTTTCAGTGCAGATGATATTTCGTCTAGTTCATGTCACCGTATCGTGAATGACAACGCTGAGATTTTC
TTTTCTAATGCGTTGGTGTATCGCCGCATCGTAAAGTCCTTGTCGAATGATGATATCAACAAAATTAGTGGTGACATGAAAGAC
TCCCTGAAAGAAATGTCATTAGAGGAGATTTACAGCTACGAAAAATACGGAGAGTTCATCACTCAGGAAGGTATCTCCTTTTAC
AACGATATTTGCGGCAAAGTTAATAGTTTCATGAATCTGTATTGTCAGAAGAATAAGGAAAACAAGAATCTGTACAAGTTACAA
AAGCTTCATAAACAGATCTTGTGCATCGCCGACACGTCTTATGAAGTCCCGTATAAATTTGAAAGCGACGAAGAAGTATATCAG
AGTGTGAATGGATTCTTGGACAATATCTCATCAAAACACATTGTTGAACGTTTGCGCAAAATCGGCGACAACTATAACGGATAC
AACTTGGATAAAATTTATATCGTATCAAAATTTTATGAATCAGTATCCCAAAAGACTTACCGTGATTGGGAGACTATTAATACG
GCGTTAGAAATCCATTACAACAACATTCTGCCGGGTAACGGTAAATCGAAAGCGGACAAAGTGAAGAAGGCGGTTAAGAACGAT
CTTCAGAAGTCTATCACGGAGATTAATGAGCTGGTTTCCAATTACAAGTTGTGCTCGGATGATAACATCAAAGCTGAAACCTAT
ATCCATGAAATTTCTCATATTCTTAATAACTTCGAGGCACAAGAATTAAAATATAACCCAGAAATTCATCTGGTTGAGAGCGAA
CTTAAAGCTTCAGAATTAAAAAATGTTTTGGACGTAATTATGAACGCCTTCCATTGGTGCAGCGTGTTTATGACAGAGGAGTTA
GTAGATAAGGATAACAACTTTTATGCAGAATTGGAAGAGATCTATGATGAGATCTATCCAGTGATTTCACTGTATAACTTAGTC
CGTAATTACGTCACTCAGAAGCCGTACTCAACTAAAAAGATCAAGTTAAATTTTGGAATTCCGACATTGGCGGATGGTTGGAGT
AAGTCTAAGGAATACTCAAATAACGCTATTATCTTAATGCGTGACAACCTGTATTACTTGGGTATTTTCAATGCCAAAAATAAG
CCCGATAAAAAAATCATTGAAGGGAATACTTCAGAAAATAAGGGAGATTACAAAAAAATGATTTATGTGCTTTTGCCAGGCCCA
AACAAAATGATCCCCAAGGTGTTTTTGAGTAGTAAGACGGGAGTAGAAACATATAAGCCATCAGCGTACATTCTTGAAGGGTAC
AAACAAAATAAACACATCAAGAGCAGCAAGGACTTTGACATTACATTTTGTCATGACTTAATCGACTACTTTAAAAATTGCATT
GCCATTCACCCTGAGTGGAAAAATTTTGGTTTCGACTTCAGTGATACCTCTACCTATGAAGATATCTCTGGTTTTTATCGTGAG
GTAGAACTTCAGGGTTACAAGATCGATTGGACGTACATTTCCGAGAAAGACATTGATCTTTTACAAGAGAAGGGTCAGCTTTAC
TTATTTCAGATCTACAATAAAGACTTTTCGAAAAAATCCACGGGCAACGACAACCTTCATACAATGTACTTAAAGAACCTGTTC
TCTGAAGAAAACTTGAAAGATATCGTGCTTAAATTGAATGGCGAGGCCGAGATTTTTTTCCGTAAAAGCTCGATTAAGAATCCC
ATCATCCACAAGAAAGGCAGCATTCTGGTAAATCGTACCTATGAAGCGGAGGAAAAGGACCAATTTGGTAATATTCAGATTGTC
CGTAAGAACATCCCTGAAAATATCTATCAAGAATTATATAAATATTTCAACGATAAGTCGGACAAGGAACTTAGCGATGAAGCC
GCGAAGTTGAAAAATGTTGTTGGTCACCACGAAGCAGCAACAAACATTGTGAAAGACTATCGCTACACTTACGATAAGTACTTT
TTACATATGCCTATTACGATTAACTTTAAGGCAAATAAGACAGGTTTTATCAACGACCGTATCCTGCAATATATTGCAAAAGAG
AAGGACCTGCATGTCATTGGGATTGATCGCGGTGAACGCAATCTGATTTACGTGAGTGTTATTGATACCTGCGGTAATATTGTT
GAGCAAAAGTCTTTTAATATCGTTAATGGTTACGACTACCAAATTAAGCTTAAACAACAGGAAGGTGCCCGCCAGATCGCCCGT
AAGGAGTGGAAGGAAATCGGAAAAATTAAGGAAATCAAAGAGGGATATCTGAGCTTGGTTATTCATGAAATCTCAAAGATGGTT
ATTAAGTACAACGCCATCATCGCTATGGAAGACTTATCGTATGGGTTTAAAAAGGGTCGTTTCAAAGTTGAGCGCCAGGTCTAC
CAAAAGTTTGAAACGATGCTTATTAATAAATTAAACTACTTGGTTTTCAAAGATATCTCTATTACCGAGAATGGAGGTTTACTG
AAAGGATACCAGTTAACGTATATCCCCGATAAGCTTAAAAACGTGGGCCATCAGTGTGGCTGTATTTTCTATGTGCCCGCGGCA
TATACATCAAAAATTGACCCGACGACGGGTTTCGTTAATATCTTCAAGTTCAAAGATCTGACAGTTGATGCAAAACGCGAATTC
ATTAAGAAGTTCGATAGTATTCGCTATGACTCCGAGAAAAATTTGTTTTGCTTCACTTTTGACTACAATAACTTTATTACTCAG
AATACAGTCATGAGTAAAAGCTCCTGGTCGGTTTACACGTACGGGGTACGCATCAAACGTCGTTTTGTGAATGGTCGTTTTAGT
AATGAGTCGGATACAATTGATATTACCAAGGATATGGAGAAGACTCTGGAAATGACAGACATCAATTGGCGTGATGGACATGAT
TTGCGTCAGGACATTATCGACTATGAGATTGTGCAGCATATTTTCGAAATTTTTCGCCTGACGGTGCAAATGCGTAATTCCTTA
AGCGAACTGGAAGATCGCGACTATGACCGCTTAATTTCTCCTGTGCTGAATGAGAACAACATCTTCTATGACTCAGCGAAAGCC
GGGGACGCTTTGCCAAAGGATGCAGATGCTAACGGTGCATATTGTATTGCTCTGAAAGGCCTTTACGAGATCAAACAAATTACT
GAAAACTGGAAGGAAGATGGAAAGTTTTCCCGTGATAAATTGAAGATCTCTAATAAGGACTGGTTTGACTTTATCCAAAATAAA
CGTTATTTA
ErCas12a-N583V-AA (SEQ ID NO: 116)
MNNGTNNFQNFIGISSLQKTLRNALIPTETTQQFIVKNGIIKEDELRGENRQILKDIMDDYYRGFISETLSSIDDIDWTSLFEK
MEIQLKNGDNKDTLIKEQTEYRKAIHKKFANDDRFKNMFSAKLISDILPEFVIHNNNYSASEKEEKTQVIKLFSRFATSFKDYF
KNRANCESADDISSSSCHRIVNDNAEIFFSNALVYRRIVKSLSNDDINKISGDMKDSLKEMSLEEIYSYEKYGEFITQEGISFY
NDICGKVNSFMNLYCQKNKENKNLYKLQKLHKQILCIADTSYEVPYKFESDEEVYQSVNGELDNISSKHIVERLRKIGDNYNGY
NLDKIYIVSKFYESVSQKTYRDWETINTALEIHYNNILPGNGKSKADKVKKAVKNDLQKSITEINELVSNYKLCSDDNIKAETY
IHEISHILNNFEAQELKYNPEIHLVESELKASELKNVLDVIMNAFHWCSVFMTEELVDKDNNFYAELEEIYDEIYPVISLYNLV
RNYVTQKPYSTKKIKLNFGIPTLADGWSKSKEYSNNAIILMRDNLYYLGIFNAKNKPDKKIIEGNTSENKGDYKKMIYVLLPGP
NKMIPKVFLSSKTGVETYKPSAYILEGYKQNKHIKSSKDFDITFCHDLIDYFKNCIAIHPEWKNFGFDFSDTSTYEDISGFYRE
VELQGYKIDWTYISEKDIDLLQEKGQLYLFQIYNKDFSKKSTGNDNLHTMYLKNLFSEENLKDIVLKLNGEAEIFFRKSSIKNP
IIHKKGSILVNRTYEAEEKDQFGNIQIVRKNIPENIYQELYKYFNDKSDKELSDEAAKLKNVVGHHEAATNIVKDYRYTYDKYF
LHMPITINFKANKTGFINDRILQYIAKEKDLHVIGIDRGERNLIYVSVIDTCGNIVEQKSFNIVNGYDYQIKLKQQEGARQIAR
KEWKEIGKIKEIKEGYLSLVIHEISKMVIKYNAIIAMEDLSYGFKKGRFKVERQVYQKFETMLINKLNYLVFKDISITENGGLL
KGYQLTYIPDKLKNVGHQCGCIFYVPAAYTSKIDPTTGFVNIFKFKDLTVDAKREFIKKFDSIRYDSEKNLFCFTFDYNNFITQ
NTVMSKSSWSVYTYGVRIKRRFVNGRFSNESDTIDITKDMEKTLEMTDINWRDGHDLRQDIIDYEIVQHIFEIFRLTVQMRNSL
SELEDRDYDRLISPVLNENNIFYDSAKAGDALPKDADANGAYCIALKGLYEIKQITENWKEDGKFSRDKLKISNKDWFDFIQNK
RYL
ErCas12a-L585K-NT (SEQ ID NO: 117)
atgAATAACGGTACCAATAACTTTCAAAATTTTATCGGGATCTCCTCGTTGCAAAAAACTCTTCGTAATGCTTTAATCCCGACT
GAGACAACACAGCAGTTCATCGTTAAAAACGGCATCATTAAAGAAGATGAGCTGCGCGGCGAGAACCGTCAGATTTTAAAGGAC
ATCATGGACGACTATTACCGTGGGTTCATCTCAGAAACATTAAGCAGCATCGATGATATCGACTGGACCTCACTGTTTGAGAAG
ATGGAGATTCAACTTAAGAATGGAGACAACAAAGACACTTTAATTAAGGAGCAGACGGAATATCGTAAAGCTATCCATAAAAAA
TTTGCAAACGATGACCGTTTCAAAAATATGTTTTCCGCAAAATTGATTAGCGACATTTTACCTGAATTCGTAATCCATAACAAC
AACTATTCCGCATCTGAAAAAGAGGAGAAGACCCAAGTTATCAAACTTTTTTCACGTTTCGCGACATCTTTTAAAGACTACTTT
AAGAATCGTGCGAATTGTTTCAGTGCAGATGATATTTCGTCTAGTTCATGTCACCGTATCGTGAATGACAACGCTGAGATTTTC
TTTTCTAATGCGTTGGTGTATCGCCGCATCGTAAAGTCCTTGTCGAATGATGATATCAACAAAATTAGTGGTGACATGAAAGAC
TCCCTGAAAGAAATGTCATTAGAGGAGATTTACAGCTACGAAAAATACGGAGAGTTCATCACTCAGGAAGGTATCTCCTTTTAC
AACGATATTTGCGGCAAAGTTAATAGTTTCATGAATCTGTATTGTCAGAAGAATAAGGAAAACAAGAATCTGTACAAGTTACAA
AAGCTTCATAAACAGATCTTGTGCATCGCCGACACGTCTTATGAAGTCCCGTATAAATTTGAAAGCGACGAAGAAGTATATCAG
AGTGTGAATGGATTCTTGGACAATATCTCATCAAAACACATTGTTGAACGTTTGCGCAAAATCGGCGACAACTATAACGGATAC
AACTTGGATAAAATTTATATCGTATCAAAATTTTATGAATCAGTATCCCAAAAGACTTACCGTGATTGGGAGACTATTAATACG
GCGTTAGAAATCCATTACAACAACATTCTGCCGGGTAACGGTAAATCGAAAGCGGACAAAGTGAAGAAGGCGGTTAAGAACGAT
CTTCAGAAGTCTATCACGGAGATTAATGAGCTGGTTTCCAATTACAAGTTGTGCTCGGATGATAACATCAAAGCTGAAACCTAT
ATCCATGAAATTTCTCATATTCTTAATAACTTCGAGGCACAAGAATTAAAATATAACCCAGAAATTCATCTGGTTGAGAGCGAA
CTTAAAGCTTCAGAATTAAAAAATGTTTTGGACGTAATTATGAACGCCTTCCATTGGTGCAGCGTGTTTATGACAGAGGAGTTA
GTAGATAAGGATAACAACTTTTATGCAGAATTGGAAGAGATCTATGATGAGATCTATCCAGTGATTTCACTGTATAACTTAGTC
CGTAATTACGTCACTCAGAAGCCGTACTCAACTAAAAAGATCAAGTTAAATTTTGGAATTCCGACATTGGCGGATGGTTGGAGT
AAGTCTAAGGAATACTCAAATAACGCTATTATCTTAATGCGTGACAACCTGTATTACTTGGGTATTTTCAATGCCAAAAATAAG
CCCGATAAAAAAATCATTGAAGGGAATACTTCAGAAAATAAGGGAGATTACAAAAAAATGATTTATAACCTTAAACCAGGCCCA
AACAAAATGATCCCCAAGGTGTTTTTGAGTAGTAAGACGGGAGTAGAAACATATAAGCCATCAGCGTACATTCTTGAAGGGTAC
AAACAAAATAAACACATCAAGAGCAGCAAGGACTTTGACATTACATTTTGTCATGACTTAATCGACTACTTTAAAAATTGCATT
GCCATTCACCCTGAGTGGAAAAATTTTGGTTTCGACTTCAGTGATACCTCTACCTATGAAGATATCTCTGGTTTTTATCGTGAG
GTAGAACTTCAGGGTTACAAGATCGATTGGACGTACATTTCCGAGAAAGACATTGATCTTTTACAAGAGAAGGGTCAGCTTTAC
TTATTTCAGATCTACAATAAAGACTTTTCGAAAAAATCCACGGGCAACGACAACCTTCATACAATGTACTTAAAGAACCTGTTC
TCTGAAGAAAACTTGAAAGATATCGTGCTTAAATTGAATGGCGAGGCCGAGATTTTTTTCCGTAAAAGCTCGATTAAGAATCCC
ATCATCCACAAGAAAGGCAGCATTCTGGTAAATCGTACCTATGAAGCGGAGGAAAAGGACCAATTTGGTAATATTCAGATTGTC
CGTAAGAACATCCCTGAAAATATCTATCAAGAATTATATAAATATTTCAACGATAAGTCGGACAAGGAACTTAGCGATGAAGCC
GCGAAGTTGAAAAATGTTGTTGGTCACCACGAAGCAGCAACAAACATTGTGAAAGACTATCGCTACACTTACGATAAGTACTTT
TTACATATGCCTATTACGATTAACTTTAAGGCAAATAAGACAGGTTTTATCAACGACCGTATCCTGCAATATATTGCAAAAGAG
AAGGACCTGCATGTCATTGGGATTGATCGCGGTGAACGCAATCTGATTTACGTGAGTGTTATTGATACCTGCGGTAATATTGTT
GAGCAAAAGTCTTTTAATATCGTTAATGGTTACGACTACCAAATTAAGCTTAAACAACAGGAAGGTGCCCGCCAGATCGCCCGT
AAGGAGTGGAAGGAAATCGGAAAAATTAAGGAAATCAAAGAGGGATATCTGAGCTTGGTTATTCATGAAATCTCAAAGATGGTT
ATTAAGTACAACGCCATCATCGCTATGGAAGACTTATCGTATGGGTTTAAAAAGGGTCGTTTCAAAGTTGAGCGCCAGGTCTAC
CAAAAGTTTGAAACGATGCTTATTAATAAATTAAACTACTTGGTTTTCAAAGATATCTCTATTACCGAGAATGGAGGTTTACTG
AAAGGATACCAGTTAACGTATATCCCCGATAAGCTTAAAAACGTGGGCCATCAGTGTGGCTGTATTTTCTATGTGCCCGCGGCA
TATACATCAAAAATTGACCCGACGACGGGTTTCGTTAATATCTTCAAGTTCAAAGATCTGACAGTTGATGCAAAACGCGAATTC
ATTAAGAAGTTCGATAGTATTCGCTATGACTCCGAGAAAAATTTGTTTTGCTTCACTTTTGACTACAATAACTTTATTACTCAG
AATACAGTCATGAGTAAAAGCTCCTGGTCGGTTTACACGTACGGGGTACGCATCAAACGTCGTTTTGTGAATGGTCGTTTTAGT
AATGAGTCGGATACAATTGATATTACCAAGGATATGGAGAAGACTCTGGAAATGACAGACATCAATTGGCGTGATGGACATGAT
TTGCGTCAGGACATTATCGACTATGAGATTGTGCAGCATATTTTCGAAATTTTTCGCCTGACGGTGCAAATGCGTAATTCCTTA
AGCGAACTGGAAGATCGCGACTATGACCGCTTAATTTCTCCTGTGCTGAATGAGAACAACATCTTCTATGACTCAGCGAAAGCC
GGGGACGCTTTGCCAAAGGATGCAGATGCTAACGGTGCATATTGTATTGCTCTGAAAGGCCTTTACGAGATCAAACAAATTACT
GAAAACTGGAAGGAAGATGGAAAGTTTTCCCGTGATAAATTGAAGATCTCTAATAAGGACTGGTTTGACTTTATCCAAAATAAA
CGTTATTTA
ErCas12a-L585K-AA (SEQ ID NO: 118)
MNNGTNNFQNFIGISSLQKTLRNALIPTETTQQFIVKNGIIKEDELRGENRQILKDIMDDYYRGFISETLSSIDDIDWTSLFEK
MEIQLKNGDNKDTLIKEQTEYRKAIHKKFANDDRFKNMFSAKLISDILPEFVIHNNNYSASEKEEKTQVIKLFSRFATSFKDYF
KNRANCFSADDISSSSCHRIVNDNAEIFFSNALVYRRIVKSLSNDDINKISGDMKDSLKEMSLEEIYSYEKYGEFITQEGISFY
NDICGKVNSFMNLYCQKNKENKNLYKLQKLHKQILCIADTSYEVPYKFESDEEVYQSVNGELDNISSKHIVERLRKIGDNYNGY
NLDKIYIVSKFYESVSQKTYRDWETINTALEIHYNNILPGNGKSKADKVKKAVKNDLQKSITEINELVSNYKLCSDDNIKAETY
IHEISHILNNFEAQELKYNPEIHLVESELKASELKNVLDVIMNAFHWCSVFMTEELVDKDNNFYAELEEIYDEIYPVISLYNLV
RNYVTQKPYSTKKIKLNFGIPTLADGWSKSKEYSNNAIILMRDNLYYLGIFNAKNKPDKKIIEGNTSENKGDYKKMIYNLKPGP
NKMIPKVFLSSKTGVETYKPSAYILEGYKQNKHIKSSKDFDITFCHDLIDYFKNCIAIHPEWKNFGFDFSDTSTYEDISGFYRE
VELQGYKIDWTYISEKDIDLLQEKGQLYLFQIYNKDFSKKSTGNDNLHTMYLKNLFSEENLKDIVLKLNGEAEIFFRKSSIKNP
IIHKKGSILVNRTYEAEEKDQFGNIQIVRKNIPENIYQELYKYFNDKSDKELSDEAAKLKNVVGHHEAATNIVKDYRYTYDKYF
LHMPITINFKANKTGFINDRILQYIAKEKDLHVIGIDRGERNLIYVSVIDTCGNIVEQKSFNIVNGYDYQIKLKQQEGARQIAR
KEWKEIGKIKEIKEGYLSLVIHEISKMVIKYNAIIAMEDLSYGFKKGRFKVERQVYQKFETMLINKLNYLVFKDISITENGGLL
KGYQLTYIPDKLKNVGHQCGCIFYVPAAYTSKIDPTTGFVNIFKFKDLTVDAKREFIKKFDSIRYDSEKNLFCFTFDYNNFITQ
NTVMSKSSWSVYTYGVRIKRRFVNGRFSNESDTIDITKDMEKTLEMTDINWRDGHDLRQDIIDYEIVQHIFEIFRLTVQMRNSL
SELEDRDYDRLISPVLNENNIFYDSAKAGDALPKDADANGAYCIALKGLYEIKQITENWKEDGKFSRDKLKISNKDWFDFIQNK
RYL
ErCas12a-F653R-NT (SEQ ID NO: 119)
atgAATAACGGTACCAATAACTTTCAAAATTTTATCGGGATCTCCTCGTTGCAAAAAACTCTTCGTAATGCTTTAATCCCGACT
GAGACAACACAGCAGTTCATCGTTAAAAACGGCATCATTAAAGAAGATGAGCTGCGCGGCGAGAACCGTCAGATTTTAAAGGAC
ATCATGGACGACTATTACCGTGGGTTCATCTCAGAAACATTAAGCAGCATCGATGATATCGACTGGACCTCACTGTTTGAGAAG
ATGGAGATTCAACTTAAGAATGGAGACAACAAAGACACTTTAATTAAGGAGCAGACGGAATATCGTAAAGCTATCCATAAAAAA
TTTGCAAACGATGACCGTTTCAAAAATATGTTTTCCGCAAAATTGATTAGCGACATTTTACCTGAATTCGTAATCCATAACAAC
AACTATTCCGCATCTGAAAAAGAGGAGAAGACCCAAGTTATCAAACTTTTTTCACGTTTCGCGACATCTTTTAAAGACTACTTT
AAGAATCGTGCGAATTGTTTCAGTGCAGATGATATTTCGTCTAGTTCATGTCACCGTATCGTGAATGACAACGCTGAGATTTTC
TTTTCTAATGCGTTGGTGTATCGCCGCATCGTAAAGTCCTTGTCGAATGATGATATCAACAAAATTAGTGGTGACATGAAAGAC
TCCCTGAAAGAAATGTCATTAGAGGAGATTTACAGCTACGAAAAATACGGAGAGTTCATCACTCAGGAAGGTATCTCCTTTTAC
AACGATATTTGCGGCAAAGTTAATAGTTTCATGAATCTGTATTGTCAGAAGAATAAGGAAAACAAGAATCTGTACAAGTTACAA
AAGCTTCATAAACAGATCTTGTGCATCGCCGACACGTCTTATGAAGTCCCGTATAAATTTGAAAGCGACGAAGAAGTATATCAG
AGTGTGAATGGATTCTTGGACAATATCTCATCAAAACACATTGTTGAACGTTTGCGCAAAATCGGCGACAACTATAACGGATAC
AACTTGGATAAAATTTATATCGTATCAAAATTTTATGAATCAGTATCCCAAAAGACTTACCGTGATTGGGAGACTATTAATACG
GCGTTAGAAATCCATTACAACAACATTCTGCCGGGTAACGGTAAATCGAAAGCGGACAAAGTGAAGAAGGCGGTTAAGAACGAT
CTTCAGAAGTCTATCACGGAGATTAATGAGCTGGTTTCCAATTACAAGTTGTGCTCGGATGATAACATCAAAGCTGAAACCTAT
ATCCATGAAATTTCTCATATTCTTAATAACTTCGAGGCACAAGAATTAAAATATAACCCAGAAATTCATCTGGTTGAGAGCGAA
CTTAAAGCTTCAGAATTAAAAAATGTTTTGGACGTAATTATGAACGCCTTCCATTGGTGCAGCGTGTTTATGACAGAGGAGTTA
GTAGATAAGGATAACAACTTTTATGCAGAATTGGAAGAGATCTATGATGAGATCTATCCAGTGATTTCACTGTATAACTTAGTC
CGTAATTACGTCACTCAGAAGCCGTACTCAACTAAAAAGATCAAGTTAAATTTTGGAATTCCGACATTGGCGGATGGTTGGAGT
AAGTCTAAGGAATACTCAAATAACGCTATTATCTTAATGCGTGACAACCTGTATTACTTGGGTATTTTCAATGCCAAAAATAAG
CCCGATAAAAAAATCATTGAAGGGAATACTTCAGAAAATAAGGGAGATTACAAAAAAATGATTTATAACCTTTTGCCAGGCCCA
AACAAAATGATCCCCAAGGTGTTTTTGAGTAGTAAGACGGGAGTAGAAACATATAAGCCATCAGCGTACATTCTTGAAGGGTAC
AAACAAAATAAACACATCAAGAGCAGCAAGGACTTTGACATTACATTTTGTCATGACTTAATCGACTACTTTAAAAATTGCATT
GCCATTCACCCTGAGTGGAAAAATCGTGGTTTCGACTTCAGTGATACCTCTACCTATGAAGATATCTCTGGTTTTTATCGTGAG
GTAGAACTTCAGGGTTACAAGATCGATTGGACGTACATTTCCGAGAAAGACATTGATCTTTTACAAGAGAAGGGTCAGCTTTAC
TTATTTCAGATCTACAATAAAGACTTTTCGAAAAAATCCACGGGCAACGACAACCTTCATACAATGTACTTAAAGAACCTGTTC
TCTGAAGAAAACTTGAAAGATATCGTGCTTAAATTGAATGGCGAGGCCGAGATTTTTTTCCGTAAAAGCTCGATTAAGAATCCC
ATCATCCACAAGAAAGGCAGCATTCTGGTAAATCGTACCTATGAAGCGGAGGAAAAGGACCAATTTGGTAATATTCAGATTGTC
CGTAAGAACATCCCTGAAAATATCTATCAAGAATTATATAAATATTTCAACGATAAGTCGGACAAGGAACTTAGCGATGAAGCC
GCGAAGTTGAAAAATGTTGTTGGTCACCACGAAGCAGCAACAAACATTGTGAAAGACTATCGCTACACTTACGATAAGTACTTT
TTACATATGCCTATTACGATTAACTTTAAGGCAAATAAGACAGGTTTTATCAACGACCGTATCCTGCAATATATTGCAAAAGAG
AAGGACCTGCATGTCATTGGGATTGATCGCGGTGAACGCAATCTGATTTACGTGAGTGTTATTGATACCTGCGGTAATATTGTT
GAGCAAAAGTCTTTTAATATCGTTAATGGTTACGACTACCAAATTAAGCTTAAACAACAGGAAGGTGCCCGCCAGATCGCCCGT
AAGGAGTGGAAGGAAATCGGAAAAATTAAGGAAATCAAAGAGGGATATCTGAGCTTGGTTATTCATGAAATCTCAAAGATGGTT
ATTAAGTACAACGCCATCATCGCTATGGAAGACTTATCGTATGGGTTTAAAAAGGGTCGTTTCAAAGTTGAGCGCCAGGTCTAC
CAAAAGTTTGAAACGATGCTTATTAATAAATTAAACTACTTGGTTTTCAAAGATATCTCTATTACCGAGAATGGAGGTTTACTG
AAAGGATACCAGTTAACGTATATCCCCGATAAGCTTAAAAACGTGGGCCATCAGTGTGGCTGTATTTTCTATGTGCCCGCGGCA
TATACATCAAAAATTGACCCGACGACGGGTTTCGTTAATATCTTCAAGTTCAAAGATCTGACAGTTGATGCAAAACGCGAATTC
ATTAAGAAGTTCGATAGTATTCGCTATGACTCCGAGAAAAATTTGTTTTGCTTCACTTTTGACTACAATAACTTTATTACTCAG
AATACAGTCATGAGTAAAAGCTCCTGGTCGGTTTACACGTACGGGGTACGCATCAAACGTCGTTTTGTGAATGGTCGTTTTAGT
AATGAGTCGGATACAATTGATATTACCAAGGATATGGAGAAGACTCTGGAAATGACAGACATCAATTGGCGTGATGGACATGAT
TTGCGTCAGGACATTATCGACTATGAGATTGTGCAGCATATTTTCGAAATTTTTCGCCTGACGGTGCAAATGCGTAATTCCTTA
AGCGAACTGGAAGATCGCGACTATGACCGCTTAATTTCTCCTGTGCTGAATGAGAACAACATCTTCTATGACTCAGCGAAAGCC
GGGGACGCTTTGCCAAAGGATGCAGATGCTAACGGTGCATATTGTATTGCTCTGAAAGGCCTTTACGAGATCAAACAAATTACT
GAAAACTGGAAGGAAGATGGAAAGTTTTCCCGTGATAAATTGAAGATCTCTAATAAGGACTGGTTTGACTTTATCCAAAATAAA
CGTTATTTA
ErCas12a-F653R-AA (SEQ ID NO: 120)
MNNGTNNFQNFIGISSLQKTLRNALIPTETTQQFIVKNGIIKEDELRGENRQILKDIMDDYYRGFISETLSSIDDIDWTSLFEK
MEIQLKNGDNKDTLIKEQTEYRKAIHKKFANDDRFKNMFSAKLISDILPEFVIHNNNYSASEKEEKTQVIKLFSRFATSFKDYF
KNRANCFSADDISSSSCHRIVNDNAEIFFSNALVYRRIVKSLSNDDINKISGDMKDSLKEMSLEEIYSYEKYGEFITQEGISFY
NDICGKVNSFMNLYCQKNKENKNLYKLQKLHKQILCIADTSYEVPYKFESDEEVYQSVNGELDNISSKHIVERLRKIGDNYNGY
NLDKIYIVSKFYESVSQKTYRDWETINTALEIHYNNILPGNGKSKADKVKKAVKNDLQKSITEINELVSNYKLCSDDNIKAETY
IHEISHILNNFEAQELKYNPEIHLVESELKASELKNVLDVIMNAFHWCSVFMTEELVDKDNNFYAELEEIYDEIYPVISLYNLV
RNYVTQKPYSTKKIKLNFGIPTLADGWSKSKEYSNNAIILMRDNLYYLGIFNAKNKPDKKIIEGNTSENKGDYKKMIYNLLPGP
NKMIPKVFLSSKTGVETYKPSAYILEGYKQNKHIKSSKDFDITFCHDLIDYFKNCIAIHPEWKNRGFDFSDTSTYEDISGFYRE
VELQGYKIDWTYISEKDIDLLQEKGQLYLFQIYNKDFSKKSTGNDNLHTMYLKNLFSEENLKDIVLKLNGEAEIFFRKSSIKNP
IIHKKGSILVNRTYEAEEKDQFGNIQIVRKNIPENIYQELYKYFNDKSDKELSDEAAKLKNVVGHHEAATNIVKDYRYTYDKYF
LHMPITINFKANKTGFINDRILQYIAKEKDLHVIGIDRGERNLIYVSVIDTCGNIVEQKSFNIVNGYDYQIKLKQQEGARQIAR
KEWKEIGKIKEIKEGYLSLVIHEISKMVIKYNAIIAMEDLSYGFKKGRFKVERQVYQKFETMLINKLNYLVFKDISITENGGLL
KGYQLTYIPDKLKNVGHQCGCIFYVPAAYTSKIDPTTGFVNIFKFKDLTVDAKREFIKKFDSIRYDSEKNLFCFTEDYNNFITQ
NTVMSKSSWSVYTYGVRIKRRFVNGRFSNESDTIDITKDMEKTLEMTDINWRDGHDLRQDIIDYEIVQHIFEIFRLTVQMRNSL
SELEDRDYDRLISPVLNENNIFYDSAKAGDALPKDADANGAYCIALKGLYEIKQITENWKEDGKFSRDKLKISNKDWFDFIQNK
RYL
ErCas12a-K712R-NT (SEQ ID NO: 121)
atgAATAACGGTACCAATAACTTTCAAAATTTTATCGGGATCTCCTCGTTGCAAAAAACTCTTCGTAATGCTTTAATCCCGACT
GAGACAACACAGCAGTTCATCGTTAAAAACGGCATCATTAAAGAAGATGAGCTGCGCGGCGAGAACCGTCAGATTTTAAAGGAC
ATCATGGACGACTATTACCGTGGGTTCATCTCAGAAACATTAAGCAGCATCGATGATATCGACTGGACCTCACTGTTTGAGAAG
ATGGAGATTCAACTTAAGAATGGAGACAACAAAGACACTTTAATTAAGGAGCAGACGGAATATCGTAAAGCTATCCATAAAAAA
TTTGCAAACGATGACCGTTTCAAAAATATGTTTTCCGCAAAATTGATTAGCGACATTTTACCTGAATTCGTAATCCATAACAAC
AACTATTCCGCATCTGAAAAAGAGGAGAAGACCCAAGTTATCAAACTTTTTTCACGTTTCGCGACATCTTTTAAAGACTACTTT
AAGAATCGTGCGAATTGTTTCAGTGCAGATGATATTTCGTCTAGTTCATGTCACCGTATCGTGAATGACAACGCTGAGATTTTC
TTTTCTAATGCGTTGGTGTATCGCCGCATCGTAAAGTCCTTGTCGAATGATGATATCAACAAAATTAGTGGTGACATGAAAGAC
TCCCTGAAAGAAATGTCATTAGAGGAGATTTACAGCTACGAAAAATACGGAGAGTTCATCACTCAGGAAGGTATCTCCTTTTAC
AACGATATTTGCGGCAAAGTTAATAGTTTCATGAATCTGTATTGTCAGAAGAATAAGGAAAACAAGAATCTGTACAAGTTACAA
AAGCTTCATAAACAGATCTTGTGCATCGCCGACACGTCTTATGAAGTCCCGTATAAATTTGAAAGCGACGAAGAAGTATATCAG
AGTGTGAATGGATTCTTGGACAATATCTCATCAAAACACATTGTTGAACGTTTGCGCAAAATCGGCGACAACTATAACGGATAC
AACTTGGATAAAATTTATATCGTATCAAAATTTTATGAATCAGTATCCCAAAAGACTTACCGTGATTGGGAGACTATTAATACG
GCGTTAGAAATCCATTACAACAACATTCTGCCGGGTAACGGTAAATCGAAAGCGGACAAAGTGAAGAAGGCGGTTAAGAACGAT
CTTCAGAAGTCTATCACGGAGATTAATGAGCTGGTTTCCAATTACAAGTTGTGCTCGGATGATAACATCAAAGCTGAAACCTAT
ATCCATGAAATTTCTCATATTCTTAATAACTTCGAGGCACAAGAATTAAAATATAACCCAGAAATTCATCTGGTTGAGAGCGAA
CTTAAAGCTTCAGAATTAAAAAATGTTTTGGACGTAATTATGAACGCCTTCCATTGGTGCAGCGTGTTTATGACAGAGGAGTTA
GTAGATAAGGATAACAACTTTTATGCAGAATTGGAAGAGATCTATGATGAGATCTATCCAGTGATTTCACTGTATAACTTAGTC
CGTAATTACGTCACTCAGAAGCCGTACTCAACTAAAAAGATCAAGTTAAATTTTGGAATTCCGACATTGGCGGATGGTTGGAGT
AAGTCTAAGGAATACTCAAATAACGCTATTATCTTAATGCGTGACAACCTGTATTACTTGGGTATTTTCAATGCCAAAAATAAG
CCCGATAAAAAAATCATTGAAGGGAATACTTCAGAAAATAAGGGAGATTACAAAAAAATGATTTATAACCTTTTGCCAGGCCCA
AACAAAATGATCCCCAAGGTGTTTTTGAGTAGTAAGACGGGAGTAGAAACATATAAGCCATCAGCGTACATTCTTGAAGGGTAC
AAACAAAATAAACACATCAAGAGCAGCAAGGACTTTGACATTACATTTTGTCATGACTTAATCGACTACTTTAAAAATTGCATT
GCCATTCACCCTGAGTGGAAAAATTTTGGTTTCGACTTCAGTGATACCTCTACCTATGAAGATATCTCTGGTTTTTATCGTGAG
GTAGAACTTCAGGGTTACAAGATCGATTGGACGTACATTTCCGAGAAAGACATTGATCTTTTACAAGAGAAGGGTCAGCTTTAC
TTATTTCAGATCTACAATAAAGACTTTTCGAAACGTTCCACGGGCAACGACAACCTTCATACAATGTACTTAAAGAACCTGTTC
TCTGAAGAAAACTTGAAAGATATCGTGCTTAAATTGAATGGCGAGGCCGAGATTTTTTTCCGTAAAAGCTCGATTAAGAATCCC
ATCATCCACAAGAAAGGCAGCATTCTGGTAAATCGTACCTATGAAGCGGAGGAAAAGGACCAATTTGGTAATATTCAGATTGTC
CGTAAGAACATCCCTGAAAATATCTATCAAGAATTATATAAATATTTCAACGATAAGTCGGACAAGGAACTTAGCGATGAAGCC
GCGAAGTTGAAAAATGTTGTTGGTCACCACGAAGCAGCAACAAACATTGTGAAAGACTATCGCTACACTTACGATAAGTACTTT
TTACATATGCCTATTACGATTAACTTTAAGGCAAATAAGACAGGTTTTATCAACGACCGTATCCTGCAATATATTGCAAAAGAG
AAGGACCTGCATGTCATTGGGATTGATCGCGGTGAACGCAATCTGATTTACGTGAGTGTTATTGATACCTGCGGTAATATTGTT
GAGCAAAAGTCTTTTAATATCGTTAATGGTTACGACTACCAAATTAAGCTTAAACAACAGGAAGGTGCCCGCCAGATCGCCCGT
AAGGAGTGGAAGGAAATCGGAAAAATTAAGGAAATCAAAGAGGGATATCTGAGCTTGGTTATTCATGAAATCTCAAAGATGGTT
ATTAAGTACAACGCCATCATCGCTATGGAAGACTTATCGTATGGGTTTAAAAAGGGTCGTTTCAAAGTTGAGCGCCAGGTCTAC
CAAAAGTTTGAAACGATGCTTATTAATAAATTAAACTACTTGGTTTTCAAAGATATCTCTATTACCGAGAATGGAGGTTTACTG
AAAGGATACCAGTTAACGTATATCCCCGATAAGCTTAAAAACGTGGGCCATCAGTGTGGCTGTATTTTCTATGTGCCCGCGGCA
TATACATCAAAAATTGACCCGACGACGGGTTTCGTTAATATCTTCAAGTTCAAAGATCTGACAGTTGATGCAAAACGCGAATTC
ATTAAGAAGTTCGATAGTATTCGCTATGACTCCGAGAAAAATTTGTTTTGCTTCACTTTTGACTACAATAACTTTATTACTCAG
AATACAGTCATGAGTAAAAGCTCCTGGTCGGTTTACACGTACGGGGTACGCATCAAACGTCGTTTTGTGAATGGTCGTTTTAGT
AATGAGTCGGATACAATTGATATTACCAAGGATATGGAGAAGACTCTGGAAATGACAGACATCAATTGGCGTGATGGACATGAT
TTGCGTCAGGACATTATCGACTATGAGATTGTGCAGCATATTTTCGAAATTTTTCGCCTGACGGTGCAAATGCGTAATTCCTTA
AGCGAACTGGAAGATCGCGACTATGACCGCTTAATTTCTCCTGTGCTGAATGAGAACAACATCTTCTATGACTCAGCGAAAGCC
GGGGACGCTTTGCCAAAGGATGCAGATGCTAACGGTGCATATTGTATTGCTCTGAAAGGCCTTTACGAGATCAAACAAATTACT
GAAAACTGGAAGGAAGATGGAAAGTTTTCCCGTGATAAATTGAAGATCTCTAATAAGGACTGGTTTGACTTTATCCAAAATAAA
CGTTATTTA
ErCas12a-K712R-AA (SEQ ID NO: 122)
MNNGTNNFQNFIGISSLQKTLRNALIPTETTQQFIVKNGIIKEDELRGENRQILKDIMDDYYRGFISETLSSIDDIDWTSLFEK
MEIQLKNGDNKDTLIKEQTEYRKAIHKKFANDDRFKNMFSAKLISDILPEFVIHNNNYSASEKEEKTQVIKLFSRFATSFKDYF
KNRANCESADDISSSSCHRIVNDNAEIFFSNALVYRRIVKSLSNDDINKISGDMKDSLKEMSLEEIYSYEKYGEFITQEGISFY
NDICGKVNSFMNLYCQKNKENKNLYKLQKLHKQILCIADTSYEVPYKFESDEEVYQSVNGELDNISSKHIVERLRKIGDNYNGY
NLDKIYIVSKFYESVSQKTYRDWETINTALEIHYNNILPGNGKSKADKVKKAVKNDLQKSITEINELVSNYKLCSDDNIKAETY
IHEISHILNNFEAQELKYNPEIHLVESELKASELKNVLDVIMNAFHWCSVFMTEELVDKDNNFYAELEEIYDEIYPVISLYNLV
RNYVTQKPYSTKKIKLNFGIPTLADGWSKSKEYSNNAIILMRDNLYYLGIFNAKNKPDKKIIEGNTSENKGDYKKMIYNLLPGP
NKMIPKVFLSSKTGVETYKPSAYILEGYKQNKHIKSSKDFDITFCHDLIDYFKNCIAIHPEWKNFGFDFSDTSTYEDISGFYRE
VELQGYKIDWTYISEKDIDLLQEKGQLYLFQIYNKDFSKRSTGNDNLHTMYLKNLFSEENLKDIVLKLNGEAEIFFRKSSIKNP
IIHKKGSILVNRTYEAEEKDQFGNIQIVRKNIPENIYQELYKYFNDKSDKELSDEAAKLKNVVGHHEAATNIVKDYRYTYDKYF
LHMPITINFKANKTGFINDRILQYIAKEKDLHVIGIDRGERNLIYVSVIDTCGNIVEQKSFNIVNGYDYQIKLKQQEGARQIAR
KEWKEIGKIKEIKEGYLSLVIHEISKMVIKYNAIIAMEDLSYGFKKGRFKVERQVYQKFETMLINKLNYLVFKDISITENGGLL
KGYQLTYIPDKLKNVGHQCGCIFYVPAAYTSKIDPTTGFVNIFKFKDLTVDAKREFIKKFDSIRYDSEKNLFCFTEDYNNFITQ
NTVMSKSSWSVYTYGVRIKRRFVNGRFSNESDTIDITKDMEKTLEMTDINWRDGHDLRQDIIDYEIVQHIFEIFRLTVQMRNSL
SELEDRDYDRLISPVLNENNIFYDSAKAGDALPKDADANGAYCIALKGLYEIKQITENWKEDGKFSRDKLKISNKDWFDFIQNK
RYL
ErCas12a-N716R-NT (SEQ ID NO: 123)
atgAATAACGGTACCAATAACTTTCAAAATTTTATCGGGATCTCCTCGTTGCAAAAAACTCTTCGTAATGCTTTAATCCCGACT
GAGACAACACAGCAGTTCATCGTTAAAAACGGCATCATTAAAGAAGATGAGCTGCGCGGCGAGAACCGTCAGATTTTAAAGGAC
ATCATGGACGACTATTACCGTGGGTTCATCTCAGAAACATTAAGCAGCATCGATGATATCGACTGGACCTCACTGTTTGAGAAG
ATGGAGATTCAACTTAAGAATGGAGACAACAAAGACACTTTAATTAAGGAGCAGACGGAATATCGTAAAGCTATCCATAAAAAA
TTTGCAAACGATGACCGTTTCAAAAATATGTTTTCCGCAAAATTGATTAGCGACATTTTACCTGAATTCGTAATCCATAACAAC
AACTATTCCGCATCTGAAAAAGAGGAGAAGACCCAAGTTATCAAACTTTTTTCACGTTTCGCGACATCTTTTAAAGACTACTTT
AAGAATCGTGCGAATTGTTTCAGTGCAGATGATATTTCGTCTAGTTCATGTCACCGTATCGTGAATGACAACGCTGAGATTTTC
TTTTCTAATGCGTTGGTGTATCGCCGCATCGTAAAGTCCTTGTCGAATGATGATATCAACAAAATTAGTGGTGACATGAAAGAC
TCCCTGAAAGAAATGTCATTAGAGGAGATTTACAGCTACGAAAAATACGGAGAGTTCATCACTCAGGAAGGTATCTCCTTTTAC
AACGATATTTGCGGCAAAGTTAATAGTTTCATGAATCTGTATTGTCAGAAGAATAAGGAAAACAAGAATCTGTACAAGTTACAA
AAGCTTCATAAACAGATCTTGTGCATCGCCGACACGTCTTATGAAGTCCCGTATAAATTTGAAAGCGACGAAGAAGTATATCAG
AGTGTGAATGGATTCTTGGACAATATCTCATCAAAACACATTGTTGAACGTTTGCGCAAAATCGGCGACAACTATAACGGATAC
AACTTGGATAAAATTTATATCGTATCAAAATTTTATGAATCAGTATCCCAAAAGACTTACCGTGATTGGGAGACTATTAATACG
GCGTTAGAAATCCATTACAACAACATTCTGCCGGGTAACGGTAAATCGAAAGCGGACAAAGTGAAGAAGGCGGTTAAGAACGAT
CTTCAGAAGTCTATCACGGAGATTAATGAGCTGGTTTCCAATTACAAGTTGTGCTCGGATGATAACATCAAAGCTGAAACCTAT
ATCCATGAAATTTCTCATATTCTTAATAACTTCGAGGCACAAGAATTAAAATATAACCCAGAAATTCATCTGGTTGAGAGCGAA
CTTAAAGCTTCAGAATTAAAAAATGTTTTGGACGTAATTATGAACGCCTTCCATTGGTGCAGCGTGTTTATGACAGAGGAGTTA
GTAGATAAGGATAACAACTTTTATGCAGAATTGGAAGAGATCTATGATGAGATCTATCCAGTGATTTCACTGTATAACTTAGTC
CGTAATTACGTCACTCAGAAGCCGTACTCAACTAAAAAGATCAAGTTAAATTTTGGAATTCCGACATTGGCGGATGGTTGGAGT
AAGTCTAAGGAATACTCAAATAACGCTATTATCTTAATGCGTGACAACCTGTATTACTTGGGTATTTTCAATGCCAAAAATAAG
CCCGATAAAAAAATCATTGAAGGGAATACTTCAGAAAATAAGGGAGATTACAAAAAAATGATTTATAACCTTTTGCCAGGCCCA
AACAAAATGATCCCCAAGGTGTTTTTGAGTAGTAAGACGGGAGTAGAAACATATAAGCCATCAGCGTACATTCTTGAAGGGTAC
AAACAAAATAAACACATCAAGAGCAGCAAGGACTTTGACATTACATTTTGTCATGACTTAATCGACTACTTTAAAAATTGCATT
GCCATTCACCCTGAGTGGAAAAATTTTGGTTTCGACTTCAGTGATACCTCTACCTATGAAGATATCTCTGGTTTTTATCGTGAG
GTAGAACTTCAGGGTTACAAGATCGATTGGACGTACATTTCCGAGAAAGACATTGATCTTTTACAAGAGAAGGGTCAGCTTTAC
TTATTTCAGATCTACAATAAAGACTTTTCGAAAAAATCCACGGGCCGTGACAACCTTCATACAATGTACTTAAAGAACCTGTTC
TCTGAAGAAAACTTGAAAGATATCGTGCTTAAATTGAATGGCGAGGCCGAGATTTTTTTCCGTAAAAGCTCGATTAAGAATCCC
ATCATCCACAAGAAAGGCAGCATTCTGGTAAATCGTACCTATGAAGCGGAGGAAAAGGACCAATTTGGTAATATTCAGATTGTC
CGTAAGAACATCCCTGAAAATATCTATCAAGAATTATATAAATATTTCAACGATAAGTCGGACAAGGAACTTAGCGATGAAGCC
GCGAAGTTGAAAAATGTTGTTGGTCACCACGAAGCAGCAACAAACATTGTGAAAGACTATCGCTACACTTACGATAAGTACTTT
TTACATATGCCTATTACGATTAACTTTAAGGCAAATAAGACAGGTTTTATCAACGACCGTATCCTGCAATATATTGCAAAAGAG
AAGGACCTGCATGTCATTGGGATTGATCGCGGTGAACGCAATCTGATTTACGTGAGTGTTATTGATACCTGCGGTAATATTGTT
GAGCAAAAGTCTTTTAATATCGTTAATGGTTACGACTACCAAATTAAGCTTAAACAACAGGAAGGTGCCCGCCAGATCGCCCGT
AAGGAGTGGAAGGAAATCGGAAAAATTAAGGAAATCAAAGAGGGATATCTGAGCTTGGTTATTCATGAAATCTCAAAGATGGTT
ATTAAGTACAACGCCATCATCGCTATGGAAGACTTATCGTATGGGTTTAAAAAGGGTCGTTTCAAAGTTGAGCGCCAGGTCTAC
CAAAAGTTTGAAACGATGCTTATTAATAAATTAAACTACTTGGTTTTCAAAGATATCTCTATTACCGAGAATGGAGGTTTACTG
AAAGGATACCAGTTAACGTATATCCCCGATAAGCTTAAAAACGTGGGCCATCAGTGTGGCTGTATTTTCTATGTGCCCGCGGCA
TATACATCAAAAATTGACCCGACGACGGGTTTCGTTAATATCTTCAAGTTCAAAGATCTGACAGTTGATGCAAAACGCGAATTC
ATTAAGAAGTTCGATAGTATTCGCTATGACTCCGAGAAAAATTTGTTTTGCTTCACTTTTGACTACAATAACTTTATTACTCAG
AATACAGTCATGAGTAAAAGCTCCTGGTCGGTTTACACGTACGGGGTACGCATCAAACGTCGTTTTGTGAATGGTCGTTTTAGT
AATGAGTCGGATACAATTGATATTACCAAGGATATGGAGAAGACTCTGGAAATGACAGACATCAATTGGCGTGATGGACATGAT
TTGCGTCAGGACATTATCGACTATGAGATTGTGCAGCATATTTTCGAAATTTTTCGCCTGACGGTGCAAATGCGTAATTCCTTA
AGCGAACTGGAAGATCGCGACTATGACCGCTTAATTTCTCCTGTGCTGAATGAGAACAACATCTTCTATGACTCAGCGAAAGCC
GGGGACGCTTTGCCAAAGGATGCAGATGCTAACGGTGCATATTGTATTGCTCTGAAAGGCCTTTACGAGATCAAACAAATTACT
GAAAACTGGAAGGAAGATGGAAAGTTTTCCCGTGATAAATTGAAGATCTCTAATAAGGACTGGTTTGACTTTATCCAAAATAAA
CGTTATTTA
ErCas12a-N716R-AA (SEQ ID NO: 124)
MNNGTNNFQNFIGISSLQKTLRNALIPTETTQQFIVKNGIIKEDELRGENRQILKDIMDDYYRGFISETLSSIDDIDWTSLFEK
MEIQLKNGDNKDTLIKEQTEYRKAIHKKFANDDRFKNMFSAKLISDILPEFVIHNNNYSASEKEEKTQVIKLFSRFATSFKDYF
KNRANCESADDISSSSCHRIVNDNAEIFFSNALVYRRIVKSLSNDDINKISGDMKDSLKEMSLEEIYSYEKYGEFITQEGISFY
NDICGKVNSFMNLYCQKNKENKNLYKLQKLHKQILCIADTSYEVPYKFESDEEVYQSVNGFLDNISSKHIVERLRKIGDNYNGY
NLDKIYIVSKFYESVSQKTYRDWETINTALEIHYNNILPGNGKSKADKVKKAVKNDLQKSITEINELVSNYKLCSDDNIKAETY
IHEISHILNNFEAQELKYNPEIHLVESELKASELKNVLDVIMNAFHWCSVFMTEELVDKDNNFYAELEEIYDEIYPVISLYNLV
RNYVTQKPYSTKKIKLNFGIPTLADGWSKSKEYSNNAIILMRDNLYYLGIFNAKNKPDKKIIEGNTSENKGDYKKMIYNLLPGP
NKMIPKVFLSSKTGVETYKPSAYILEGYKQNKHIKSSKDFDITFCHDLIDYFKNCIAIHPEWKNFGFDFSDTSTYEDISGFYRE
VELQGYKIDWTYISEKDIDLLQEKGQLYLFQIYNKDFSKKSTGRDNLHTMYLKNLFSEENLKDIVLKLNGEAEIFFRKSSIKNP
IIHKKGSILVNRTYEAEEKDQFGNIQIVRKNIPENIYQELYKYFNDKSDKELSDEAAKLKNVVGHHEAATNIVKDYRYTYDKYF
LHMPITINFKANKTGFINDRILQYIAKEKDLHVIGIDRGERNLIYVSVIDTCGNIVEQKSFNIVNGYDYQIKLKQQEGARQIAR
KEWKEIGKIKEIKEGYLSLVIHEISKMVIKYNAIIAMEDLSYGFKKGRFKVERQVYQKFETMLINKLNYLVFKDISITENGGLL
KGYQLTYIPDKLKNVGHQCGCIFYVPAAYTSKIDPTTGFVNIFKFKDLTVDAKREFIKKFDSIRYDSEKNLFCFTEDYNNFITQ
NTVMSKSSWSVYTYGVRIKRRFVNGRFSNESDTIDITKDMEKTLEMTDINWRDGHDLRQDIIDYEIVQHIFEIFRLTVQMRNSL
SELEDRDYDRLISPVLNENNIFYDSAKAGDALPKDADANGAYCIALKGLYEIKQITENWKEDGKFSRDKLKISNKDWEDFIQNK
RYL
ErCas12a-E731P-NT (SEQ ID NO: 125)
atgAATAACGGTACCAATAACTTTCAAAATTTTATCGGGATCTCCTCGTTGCAAAAAACTCTTCGTAATGCTTTAATCCCGACT
GAGACAACACAGCAGTTCATCGTTAAAAACGGCATCATTAAAGAAGATGAGCTGCGCGGCGAGAACCGTCAGATTTTAAAGGAC
ATCATGGACGACTATTACCGTGGGTTCATCTCAGAAACATTAAGCAGCATCGATGATATCGACTGGACCTCACTGTTTGAGAAG
ATGGAGATTCAACTTAAGAATGGAGACAACAAAGACACTTTAATTAAGGAGCAGACGGAATATCGTAAAGCTATCCATAAAAAA
TTTGCAAACGATGACCGTTTCAAAAATATGTTTTCCGCAAAATTGATTAGCGACATTTTACCTGAATTCGTAATCCATAACAAC
AACTATTCCGCATCTGAAAAAGAGGAGAAGACCCAAGTTATCAAACTTTTTTCACGTTTCGCGACATCTTTTAAAGACTACTTT
AAGAATCGTGCGAATTGTTTCAGTGCAGATGATATTTCGTCTAGTTCATGTCACCGTATCGTGAATGACAACGCTGAGATTTTC
TTTTCTAATGCGTTGGTGTATCGCCGCATCGTAAAGTCCTTGTCGAATGATGATATCAACAAAATTAGTGGTGACATGAAAGAC
TCCCTGAAAGAAATGTCATTAGAGGAGATTTACAGCTACGAAAAATACGGAGAGTTCATCACTCAGGAAGGTATCTCCTTTTAC
AACGATATTTGCGGCAAAGTTAATAGTTTCATGAATCTGTATTGTCAGAAGAATAAGGAAAACAAGAATCTGTACAAGTTACAA
AAGCTTCATAAACAGATCTTGTGCATCGCCGACACGTCTTATGAAGTCCCGTATAAATTTGAAAGCGACGAAGAAGTATATCAG
AGTGTGAATGGATTCTTGGACAATATCTCATCAAAACACATTGTTGAACGTTTGCGCAAAATCGGCGACAACTATAACGGATAC
AACTTGGATAAAATTTATATCGTATCAAAATTTTATGAATCAGTATCCCAAAAGACTTACCGTGATTGGGAGACTATTAATACG
GCGTTAGAAATCCATTACAACAACATTCTGCCGGGTAACGGTAAATCGAAAGCGGACAAAGTGAAGAAGGCGGTTAAGAACGAT
CTTCAGAAGTCTATCACGGAGATTAATGAGCTGGTTTCCAATTACAAGTTGTGCTCGGATGATAACATCAAAGCTGAAACCTAT
ATCCATGAAATTTCTCATATTCTTAATAACTTCGAGGCACAAGAATTAAAATATAACCCAGAAATTCATCTGGTTGAGAGCGAA
CTTAAAGCTTCAGAATTAAAAAATGTTTTGGACGTAATTATGAACGCCTTCCATTGGTGCAGCGTGTTTATGACAGAGGAGTTA
GTAGATAAGGATAACAACTTTTATGCAGAATTGGAAGAGATCTATGATGAGATCTATCCAGTGATTTCACTGTATAACTTAGTC
CGTAATTACGTCACTCAGAAGCCGTACTCAACTAAAAAGATCAAGTTAAATTTTGGAATTCCGACATTGGCGGATGGTTGGAGT
AAGTCTAAGGAATACTCAAATAACGCTATTATCTTAATGCGTGACAACCTGTATTACTTGGGTATTTTCAATGCCAAAAATAAG
CCCGATAAAAAAATCATTGAAGGGAATACTTCAGAAAATAAGGGAGATTACAAAAAAATGATTTATAACCTTTTGCCAGGCCCA
AACAAAATGATCCCCAAGGTGTTTTTGAGTAGTAAGACGGGAGTAGAAACATATAAGCCATCAGCGTACATTCTTGAAGGGTAC
AAACAAAATAAACACATCAAGAGCAGCAAGGACTTTGACATTACATTTTGTCATGACTTAATCGACTACTTTAAAAATTGCATT
GCCATTCACCCTGAGTGGAAAAATTTTGGTTTCGACTTCAGTGATACCTCTACCTATGAAGATATCTCTGGTTTTTATCGTGAG
GTAGAACTTCAGGGTTACAAGATCGATTGGACGTACATTTCCGAGAAAGACATTGATCTTTTACAAGAGAAGGGTCAGCTTTAC
TTATTTCAGATCTACAATAAAGACTTTTCGAAAAAATCCACGGGCAACGACAACCTTCATACAATGTACTTAAAGAACCTGTTC
TCTGAACCGAACTTGAAAGATATCGTGCTTAAATTGAATGGCGAGGCCGAGATTTTTTTCCGTAAAAGCTCGATTAAGAATCCC
ATCATCCACAAGAAAGGCAGCATTCTGGTAAATCGTACCTATGAAGCGGAGGAAAAGGACCAATTTGGTAATATTCAGATTGTC
CGTAAGAACATCCCTGAAAATATCTATCAAGAATTATATAAATATTTCAACGATAAGTCGGACAAGGAACTTAGCGATGAAGCC
GCGAAGTTGAAAAATGTTGTTGGTCACCACGAAGCAGCAACAAACATTGTGAAAGACTATCGCTACACTTACGATAAGTACTTT
TTACATATGCCTATTACGATTAACTTTAAGGCAAATAAGACAGGTTTTATCAACGACCGTATCCTGCAATATATTGCAAAAGAG
AAGGACCTGCATGTCATTGGGATTGATCGCGGTGAACGCAATCTGATTTACGTGAGTGTTATTGATACCTGCGGTAATATTGTT
GAGCAAAAGTCTTTTAATATCGTTAATGGTTACGACTACCAAATTAAGCTTAAACAACAGGAAGGTGCCCGCCAGATCGCCCGT
AAGGAGTGGAAGGAAATCGGAAAAATTAAGGAAATCAAAGAGGGATATCTGAGCTTGGTTATTCATGAAATCTCAAAGATGGTT
ATTAAGTACAACGCCATCATCGCTATGGAAGACTTATCGTATGGGTTTAAAAAGGGTCGTTTCAAAGTTGAGCGCCAGGTCTAC
CAAAAGTTTGAAACGATGCTTATTAATAAATTAAACTACTTGGTTTTCAAAGATATCTCTATTACCGAGAATGGAGGTTTACTG
AAAGGATACCAGTTAACGTATATCCCCGATAAGCTTAAAAACGTGGGCCATCAGTGTGGCTGTATTTTCTATGTGCCCGCGGCA
TATACATCAAAAATTGACCCGACGACGGGTTTCGTTAATATCTTCAAGTTCAAAGATCTGACAGTTGATGCAAAACGCGAATTC
ATTAAGAAGTTCGATAGTATTCGCTATGACTCCGAGAAAAATTTGTTTTGCTTCACTTTTGACTACAATAACTTTATTACTCAG
AATACAGTCATGAGTAAAAGCTCCTGGTCGGTTTACACGTACGGGGTACGCATCAAACGTCGTTTTGTGAATGGTCGTTTTAGT
AATGAGTCGGATACAATTGATATTACCAAGGATATGGAGAAGACTCTGGAAATGACAGACATCAATTGGCGTGATGGACATGAT
TTGCGTCAGGACATTATCGACTATGAGATTGTGCAGCATATTTTCGAAATTTTTCGCCTGACGGTGCAAATGCGTAATTCCTTA
AGCGAACTGGAAGATCGCGACTATGACCGCTTAATTTCTCCTGTGCTGAATGAGAACAACATCTTCTATGACTCAGCGAAAGCC
GGGGACGCTTTGCCAAAGGATGCAGATGCTAACGGTGCATATTGTATTGCTCTGAAAGGCCTTTACGAGATCAAACAAATTACT
GAAAACTGGAAGGAAGATGGAAAGTTTTCCCGTGATAAATTGAAGATCTCTAATAAGGACTGGTTTGACTTTATCCAAAATAAA
CGTTATTTA
ErCas12a-E731P-AA (SEQ ID NO: 126)
MNNGTNNFQNFIGISSLQKTLRNALIPTETTQQFIVKNGIIKEDELRGENRQILKDIMDDYYRGFISETLSSIDDIDWTSLFEK
MEIQLKNGDNKDTLIKEQTEYRKAIHKKFANDDRFKNMESAKLISDILPEFVIHNNNYSASEKEEKTQVIKLESRFATSFKDYF
KNRANCFSADDISSSSCHRIVNDNAEIFFSNALVYRRIVKSLSNDDINKISGDMKDSLKEMSLEEIYSYEKYGEFITQEGISFY
NDICGKVNSFMNLYCQKNKENKNLYKLQKLHKQILCIADTSYEVPYKFESDEEVYQSVNGELDNISSKHIVERLRKIGDNYNGY
NLDKIYIVSKFYESVSQKTYRDWETINTALEIHYNNILPGNGKSKADKVKKAVKNDLQKSITEINELVSNYKLCSDDNIKAETY
IHEISHILNNFEAQELKYNPEIHLVESELKASELKNVLDVIMNAFHWCSVFMTEELVDKDNNFYAELEEIYDEIYPVISLYNLV
RNYVTQKPYSTKKIKLNFGIPTLADGWSKSKEYSNNAIILMRDNLYYLGIFNAKNKPDKKIIEGNTSENKGDYKKMIYNLLPGP
NKMIPKVFLSSKTGVETYKPSAYILEGYKQNKHIKSSKDFDITFCHDLIDYFKNCIAIHPEWKNFGFDFSDTSTYEDISGFYRE
VELQGYKIDWTYISEKDIDLLQEKGQLYLFQIYNKDFSKKSTGNDNLHTMYLKNLFSEPNLKDIVLKLNGEAEIFFRKSSIKNP
IIHKKGSILVNRTYEAEEKDQFGNIQIVRKNIPENIYQELYKYFNDKSDKELSDEAAKLKNVVGHHEAATNIVKDYRYTYDKYF
LHMPITINFKANKTGFINDRILQYIAKEKDLHVIGIDRGERNLIYVSVIDTCGNIVEQKSFNIVNGYDYQIKLKQQEGARQIAR
KEWKEIGKIKEIKEGYLSLVIHEISKMVIKYNAIIAMEDLSYGFKKGRFKVERQVYQKFETMLINKLNYLVFKDISITENGGLL
KGYQLTYIPDKLKNVGHQCGCIFYVPAAYTSKIDPTTGFVNIFKFKDLTVDAKREFIKKEDSIRYDSEKNLFCFTFDYNNFITQ
NTVMSKSSWSVYTYGVRIKRRFVNGRFSNESDTIDITKDMEKTLEMTDINWRDGHDLRQDIIDYEIVQHIFEIFRLTVQMRNSL
SELEDRDYDRLISPVLNENNIFYDSAKAGDALPKDADANGAYCIALKGLYEIKQITENWKEDGKFSRDKLKISNKDWEDFIQNK
RYL
ErCas12a-N732T-NT (SEQ ID NO: 127)
atgAATAACGGTACCAATAACTTTCAAAATTTTATCGGGATCTCCTCGTTGCAAAAAACTCTTCGTAATGCTTTAATCCCGACT
GAGACAACACAGCAGTTCATCGTTAAAAACGGCATCATTAAAGAAGATGAGCTGCGCGGCGAGAACCGTCAGATTTTAAAGGAC
ATCATGGACGACTATTACCGTGGGTTCATCTCAGAAACATTAAGCAGCATCGATGATATCGACTGGACCTCACTGTTTGAGAAG
ATGGAGATTCAACTTAAGAATGGAGACAACAAAGACACTTTAATTAAGGAGCAGACGGAATATCGTAAAGCTATCCATAAAAAA
TTTGCAAACGATGACCGTTTCAAAAATATGTTTTCCGCAAAATTGATTAGCGACATTTTACCTGAATTCGTAATCCATAACAAC
AACTATTCCGCATCTGAAAAAGAGGAGAAGACCCAAGTTATCAAACTTTTTTCACGTTTCGCGACATCTTTTAAAGACTACTTT
AAGAATCGTGCGAATTGTTTCAGTGCAGATGATATTTCGTCTAGTTCATGTCACCGTATCGTGAATGACAACGCTGAGATTTTC
TTTTCTAATGCGTTGGTGTATCGCCGCATCGTAAAGTCCTTGTCGAATGATGATATCAACAAAATTAGTGGTGACATGAAAGAC
TCCCTGAAAGAAATGTCATTAGAGGAGATTTACAGCTACGAAAAATACGGAGAGTTCATCACTCAGGAAGGTATCTCCTTTTAC
AACGATATTTGCGGCAAAGTTAATAGTTTCATGAATCTGTATTGTCAGAAGAATAAGGAAAACAAGAATCTGTACAAGTTACAA
AAGCTTCATAAACAGATCTTGTGCATCGCCGACACGTCTTATGAAGTCCCGTATAAATTTGAAAGCGACGAAGAAGTATATCAG
AGTGTGAATGGATTCTTGGACAATATCTCATCAAAACACATTGTTGAACGTTTGCGCAAAATCGGCGACAACTATAACGGATAC
AACTTGGATAAAATTTATATCGTATCAAAATTTTATGAATCAGTATCCCAAAAGACTTACCGTGATTGGGAGACTATTAATACG
GCGTTAGAAATCCATTACAACAACATTCTGCCGGGTAACGGTAAATCGAAAGCGGACAAAGTGAAGAAGGCGGTTAAGAACGAT
CTTCAGAAGTCTATCACGGAGATTAATGAGCTGGTTTCCAATTACAAGTTGTGCTCGGATGATAACATCAAAGCTGAAACCTAT
ATCCATGAAATTTCTCATATTCTTAATAACTTCGAGGCACAAGAATTAAAATATAACCCAGAAATTCATCTGGTTGAGAGCGAA
CTTAAAGCTTCAGAATTAAAAAATGTTTTGGACGTAATTATGAACGCCTTCCATTGGTGCAGCGTGTTTATGACAGAGGAGTTA
GTAGATAAGGATAACAACTTTTATGCAGAATTGGAAGAGATCTATGATGAGATCTATCCAGTGATTTCACTGTATAACTTAGTC
CGTAATTACGTCACTCAGAAGCCGTACTCAACTAAAAAGATCAAGTTAAATTTTGGAATTCCGACATTGGCGGATGGTTGGAGT
AAGTCTAAGGAATACTCAAATAACGCTATTATCTTAATGCGTGACAACCTGTATTACTTGGGTATTTTCAATGCCAAAAATAAG
CCCGATAAAAAAATCATTGAAGGGAATACTTCAGAAAATAAGGGAGATTACAAAAAAATGATTTATAACCTTTTGCCAGGCCCA
AACAAAATGATCCCCAAGGTGTTTTTGAGTAGTAAGACGGGAGTAGAAACATATAAGCCATCAGCGTACATTCTTGAAGGGTAC
AAACAAAATAAACACATCAAGAGCAGCAAGGACTTTGACATTACATTTTGTCATGACTTAATCGACTACTTTAAAAATTGCATT
GCCATTCACCCTGAGTGGAAAAATTTTGGTTTCGACTTCAGTGATACCTCTACCTATGAAGATATCTCTGGTTTTTATCGTGAG
GTAGAACTTCAGGGTTACAAGATCGATTGGACGTACATTTCCGAGAAAGACATTGATCTTTTACAAGAGAAGGGTCAGCTTTAC
TTATTTCAGATCTACAATAAAGACTTTTCGAAAAAATCCACGGGCAACGACAACCTTCATACAATGTACTTAAAGAACCTGTTC
TCTGAAGAAACCTTGAAAGATATCGTGCTTAAATTGAATGGCGAGGCCGAGATTTTTTTCCGTAAAAGCTCGATTAAGAATCCC
ATCATCCACAAGAAAGGCAGCATTCTGGTAAATCGTACCTATGAAGCGGAGGAAAAGGACCAATTTGGTAATATTCAGATTGTC
CGTAAGAACATCCCTGAAAATATCTATCAAGAATTATATAAATATTTCAACGATAAGTCGGACAAGGAACTTAGCGATGAAGCC
GCGAAGTTGAAAAATGTTGTTGGTCACCACGAAGCAGCAACAAACATTGTGAAAGACTATCGCTACACTTACGATAAGTACTTT
TTACATATGCCTATTACGATTAACTTTAAGGCAAATAAGACAGGTTTTATCAACGACCGTATCCTGCAATATATTGCAAAAGAG
AAGGACCTGCATGTCATTGGGATTGATCGCGGTGAACGCAATCTGATTTACGTGAGTGTTATTGATACCTGCGGTAATATTGTT
GAGCAAAAGTCTTTTAATATCGTTAATGGTTACGACTACCAAATTAAGCTTAAACAACAGGAAGGTGCCCGCCAGATCGCCCGT
AAGGAGTGGAAGGAAATCGGAAAAATTAAGGAAATCAAAGAGGGATATCTGAGCTTGGTTATTCATGAAATCTCAAAGATGGTT
ATTAAGTACAACGCCATCATCGCTATGGAAGACTTATCGTATGGGTTTAAAAAGGGTCGTTTCAAAGTTGAGCGCCAGGTCTAC
CAAAAGTTTGAAACGATGCTTATTAATAAATTAAACTACTTGGTTTTCAAAGATATCTCTATTACCGAGAATGGAGGTTTACTG
AAAGGATACCAGTTAACGTATATCCCCGATAAGCTTAAAAACGTGGGCCATCAGTGTGGCTGTATTTTCTATGTGCCCGCGGCA
TATACATCAAAAATTGACCCGACGACGGGTTTCGTTAATATCTTCAAGTTCAAAGATCTGACAGTTGATGCAAAACGCGAATTC
ATTAAGAAGTTCGATAGTATTCGCTATGACTCCGAGAAAAATTTGTTTTGCTTCACTTTTGACTACAATAACTTTATTACTCAG
AATACAGTCATGAGTAAAAGCTCCTGGTCGGTTTACACGTACGGGGTACGCATCAAACGTCGTTTTGTGAATGGTCGTTTTAGT
AATGAGTCGGATACAATTGATATTACCAAGGATATGGAGAAGACTCTGGAAATGACAGACATCAATTGGCGTGATGGACATGAT
TTGCGTCAGGACATTATCGACTATGAGATTGTGCAGCATATTTTCGAAATTTTTCGCCTGACGGTGCAAATGCGTAATTCCTTA
AGCGAACTGGAAGATCGCGACTATGACCGCTTAATTTCTCCTGTGCTGAATGAGAACAACATCTTCTATGACTCAGCGAAAGCC
GGGGACGCTTTGCCAAAGGATGCAGATGCTAACGGTGCATATTGTATTGCTCTGAAAGGCCTTTACGAGATCAAACAAATTACT
GAAAACTGGAAGGAAGATGGAAAGTTTTCCCGTGATAAATTGAAGATCTCTAATAAGGACTGGTTTGACTTTATCCAAAATAAA
CGTTATTTA
ErCas12a-N732T-AA (SEQ ID NO: 128)
MNNGTNNFQNFIGISSLQKTLRNALIPTETTQQFIVKNGIIKEDELRGENRQILKDIMDDYYRGFISETLSSIDDIDWTS
LFEKMEIQLKNGDNKDTLIKEQTEYRKAIHKKFANDDRFKNMFSAKLISDILPEFVIHNNNYSASEKEEKTQVIKLFSR
FATSFKDYFKNRANCFSADDISSSSCHRIVNDNAEIFFSNALVYRRIVKSLSNDDINKISGDMKDSLKEMSLEEIYSYE
KYGEFITQEGISFYNDICGKVNSFMNLYCQKNKENKNLYKLQKLHKQILCIADTSYEVPYKFESDEEVYQSVNGFLD
NISSKHIVERLRKIGDNYNGYNLDKIYIVSKFYESVSQKTYRDWETINTALEIHYNNILPGNGKSKADKVKKAVKNDLQ
KSITEINELVSNYKLCSDDNIKAETYIHEISHILNNFEAQELKYNPEIHLVESELKASELKNVLDVIMNAFHWCSVFMTE
ELVDKDNNFYAELEEIYDEIYPVISLYNLVRNYVTQKPYSTKKIKLNFGIPTLADGWSKSKEYSNNAIILMRDNLYYLGI
FNAKNKPDKKIIEGNTSENKGDYKKMIYNLLPGPNKMIPKVFLSSKTGVETYKPSAYILEGYKQNKHIKSSKDFDITFC
HDLIDYFKNCIAIHPEWKNFGFDFSDTSTYEDISGFYREVELQGYKIDWTYISEKDIDLLQEKGQLYLFQIYNKDFSKK
STGNDNLHTMYLKNLFSEETLKDIVLKLNGEAEIFFRKSSIKNPIIHKKGSILVNRTYEAEEKDQFGNIQIVRKNIPENIY
QELYKYFNDKSDKELSDEAAKLKNVVGHHEAATNIVKDYRYTYDKYFLHMPITINFKANKTGFINDRILQYIAKEKDL
HVIGIDRGERNLIYVSVIDTCGNIVEQKSFNIVNGYDYQIKLKQQEGARQIARKEWKEIGKIKEIKEGYLSLVIHEISKM
VIKYNAIIAMEDLSYGFKKGRFKVERQVYQKFETMLINKLNYLVFKDISITENGGLLKGYQLTYIPDKLKNVGHQCGCI
FYVPAAYTSKIDPTTGFVNIFKFKDLTVDAKREFIKKFDSIRYDSEKNLFCFTFDYNNFITQNTVMSKSSWSVYTYGV
RIKRRFVNGRFSNESDTIDITKDMEKTLEMTDINWRDGHDLRQDIIDYEIVQHIFEIFRLTVQMRNSLSELEDRDYDR
LISPVLNENNIFYDSAKAGDALPKDADANGAYCIALKGLYEIKQITENWKEDGKFSRDKLKISNKDWFDFIQNKRYL
ErCas12a-A744T-NT (SEQ ID NO: 129)
atgAATAACGGTACCAATAACTTTCAAAATTTTATCGGGATCTCCTCGTTGCAAAAAACTCTTCGTAATGCTTTAATCCCGACT
GAGACAACACAGCAGTTCATCGTTAAAAACGGCATCATTAAAGAAGATGAGCTGCGCGGCGAGAACCGTCAGATTTTAAAGGAC
ATCATGGACGACTATTACCGTGGGTTCATCTCAGAAACATTAAGCAGCATCGATGATATCGACTGGACCTCACTGTTTGAGAAG
ATGGAGATTCAACTTAAGAATGGAGACAACAAAGACACTTTAATTAAGGAGCAGACGGAATATCGTAAAGCTATCCATAAAAAA
TTTGCAAACGATGACCGTTTCAAAAATATGTTTTCCGCAAAATTGATTAGCGACATTTTACCTGAATTCGTAATCCATAACAAC
AACTATTCCGCATCTGAAAAAGAGGAGAAGACCCAAGTTATCAAACTTTTTTCACGTTTCGCGACATCTTTTAAAGACTACTTT
AAGAATCGTGCGAATTGTTTCAGTGCAGATGATATTTCGTCTAGTTCATGTCACCGTATCGTGAATGACAACGCTGAGATTTTC
TTTTCTAATGCGTTGGTGTATCGCCGCATCGTAAAGTCCTTGTCGAATGATGATATCAACAAAATTAGTGGTGACATGAAAGAC
TCCCTGAAAGAAATGTCATTAGAGGAGATTTACAGCTACGAAAAATACGGAGAGTTCATCACTCAGGAAGGTATCTCCTTTTAC
AACGATATTTGCGGCAAAGTTAATAGTTTCATGAATCTGTATTGTCAGAAGAATAAGGAAAACAAGAATCTGTACAAGTTACAA
AAGCTTCATAAACAGATCTTGTGCATCGCCGACACGTCTTATGAAGTCCCGTATAAATTTGAAAGCGACGAAGAAGTATATCAG
AGTGTGAATGGATTCTTGGACAATATCTCATCAAAACACATTGTTGAACGTTTGCGCAAAATCGGCGACAACTATAACGGATAC
AACTTGGATAAAATTTATATCGTATCAAAATTTTATGAATCAGTATCCCAAAAGACTTACCGTGATTGGGAGACTATTAATACG
GCGTTAGAAATCCATTACAACAACATTCTGCCGGGTAACGGTAAATCGAAAGCGGACAAAGTGAAGAAGGCGGTTAAGAACGAT
CTTCAGAAGTCTATCACGGAGATTAATGAGCTGGTTTCCAATTACAAGTTGTGCTCGGATGATAACATCAAAGCTGAAACCTAT
ATCCATGAAATTTCTCATATTCTTAATAACTTCGAGGCACAAGAATTAAAATATAACCCAGAAATTCATCTGGTTGAGAGCGAA
CTTAAAGCTTCAGAATTAAAAAATGTTTTGGACGTAATTATGAACGCCTTCCATTGGTGCAGCGTGTTTATGACAGAGGAGTTA
GTAGATAAGGATAACAACTTTTATGCAGAATTGGAAGAGATCTATGATGAGATCTATCCAGTGATTTCACTGTATAACTTAGTC
CGTAATTACGTCACTCAGAAGCCGTACTCAACTAAAAAGATCAAGTTAAATTTTGGAATTCCGACATTGGCGGATGGTTGGAGT
AAGTCTAAGGAATACTCAAATAACGCTATTATCTTAATGCGTGACAACCTGTATTACTTGGGTATTTTCAATGCCAAAAATAAG
CCCGATAAAAAAATCATTGAAGGGAATACTTCAGAAAATAAGGGAGATTACAAAAAAATGATTTATAACCTTTTGCCAGGCCCA
AACAAAATGATCCCCAAGGTGTTTTTGAGTAGTAAGACGGGAGTAGAAACATATAAGCCATCAGCGTACATTCTTGAAGGGTAC
AAACAAAATAAACACATCAAGAGCAGCAAGGACTTTGACATTACATTTTGTCATGACTTAATCGACTACTTTAAAAATTGCATT
GCCATTCACCCTGAGTGGAAAAATTTTGGTTTCGACTTCAGTGATACCTCTACCTATGAAGATATCTCTGGTTTTTATCGTGAG
GTAGAACTTCAGGGTTACAAGATCGATTGGACGTACATTTCCGAGAAAGACATTGATCTTTTACAAGAGAAGGGTCAGCTTTAC
TTATTTCAGATCTACAATAAAGACTTTTCGAAAAAATCCACGGGCAACGACAACCTTCATACAATGTACTTAAAGAACCTGTTC
TCTGAAGAAAACTTGAAAGATATCGTGCTTAAATTGAATGGCGAGACCGAGATTTTTTTCCGTAAAAGCTCGATTAAGAATCCC
ATCATCCACAAGAAAGGCAGCATTCTGGTAAATCGTACCTATGAAGCGGAGGAAAAGGACCAATTTGGTAATATTCAGATTGTC
CGTAAGAACATCCCTGAAAATATCTATCAAGAATTATATAAATATTTCAACGATAAGTCGGACAAGGAACTTAGCGATGAAGCC
GCGAAGTTGAAAAATGTTGTTGGTCACCACGAAGCAGCAACAAACATTGTGAAAGACTATCGCTACACTTACGATAAGTACTTT
TTACATATGCCTATTACGATTAACTTTAAGGCAAATAAGACAGGTTTTATCAACGACCGTATCCTGCAATATATTGCAAAAGAG
AAGGACCTGCATGTCATTGGGATTGATCGCGGTGAACGCAATCTGATTTACGTGAGTGTTATTGATACCTGCGGTAATATTGTT
GAGCAAAAGTCTTTTAATATCGTTAATGGTTACGACTACCAAATTAAGCTTAAACAACAGGAAGGTGCCCGCCAGATCGCCCGT
AAGGAGTGGAAGGAAATCGGAAAAATTAAGGAAATCAAAGAGGGATATCTGAGCTTGGTTATTCATGAAATCTCAAAGATGGTT
ATTAAGTACAACGCCATCATCGCTATGGAAGACTTATCGTATGGGTTTAAAAAGGGTCGTTTCAAAGTTGAGCGCCAGGTCTAC
CAAAAGTTTGAAACGATGCTTATTAATAAATTAAACTACTTGGTTTTCAAAGATATCTCTATTACCGAGAATGGAGGTTTACTG
AAAGGATACCAGTTAACGTATATCCCCGATAAGCTTAAAAACGTGGGCCATCAGTGTGGCTGTATTTTCTATGTGCCCGCGGCA
TATACATCAAAAATTGACCCGACGACGGGTTTCGTTAATATCTTCAAGTTCAAAGATCTGACAGTTGATGCAAAACGCGAATTC
ATTAAGAAGTTCGATAGTATTCGCTATGACTCCGAGAAAAATTTGTTTTGCTTCACTTTTGACTACAATAACTTTATTACTCAG
AATACAGTCATGAGTAAAAGCTCCTGGTCGGTTTACACGTACGGGGTACGCATCAAACGTCGTTTTGTGAATGGTCGTTTTAGT
AATGAGTCGGATACAATTGATATTACCAAGGATATGGAGAAGACTCTGGAAATGACAGACATCAATTGGCGTGATGGACATGAT
TTGCGTCAGGACATTATCGACTATGAGATTGTGCAGCATATTTTCGAAATTTTTCGCCTGACGGTGCAAATGCGTAATTCCTTA
AGCGAACTGGAAGATCGCGACTATGACCGCTTAATTTCTCCTGTGCTGAATGAGAACAACATCTTCTATGACTCAGCGAAAGCC
GGGGACGCTTTGCCAAAGGATGCAGATGCTAACGGTGCATATTGTATTGCTCTGAAAGGCCTTTACGAGATCAAACAAATTACT
GAAAACTGGAAGGAAGATGGAAAGTTTTCCCGTGATAAATTGAAGATCTCTAATAAGGACTGGTTTGACTTTATCCAAAATAAA
CGTTATTTA
ErCas12a-A744T-AA (SEQ ID NO: 130)
MNNGTNNFQNFIGISSLQKTLRNALIPTETTQQFIVKNGIIKEDELRGENRQILKDIMDDYYRGFISETLSSIDDIDWTSLFEK
MEIQLKNGDNKDTLIKEQTEYRKAIHKKFANDDRFKNMFSAKLISDILPEFVIHNNNYSASEKEEKTQVIKLESRFATSFKDYF
KNRANCFSADDISSSSCHRIVNDNAEIFFSNALVYRRIVKSLSNDDINKISGDMKDSLKEMSLEEIYSYEKYGEFITQEGISFY
NDICGKVNSFMNLYCQKNKENKNLYKLQKLHKQILCIADTSYEVPYKFESDEEVYQSVNGELDNISSKHIVERLRKIGDNYNGY
NLDKIYIVSKFYESVSQKTYRDWETINTALEIHYNNILPGNGKSKADKVKKAVKNDLQKSITEINELVSNYKLCSDDNIKAETY
IHEISHILNNFEAQELKYNPEIHLVESELKASELKNVLDVIMNAFHWCSVFMTEELVDKDNNFYAELEEIYDEIYPVISLYNLV
RNYVTQKPYSTKKIKLNFGIPTLADGWSKSKEYSNNAIILMRDNLYYLGIFNAKNKPDKKIIEGNTSENKGDYKKMIYNLLPGP
NKMIPKVFLSSKTGVETYKPSAYILEGYKQNKHIKSSKDFDITFCHDLIDYFKNCIAIHPEWKNFGFDFSDTSTYEDISGFYRE
VELQGYKIDWTYISEKDIDLLQEKGQLYLFQIYNKDFSKKSTGNDNLHTMYLKNLFSEENLKDIVLKLNGETEIFFRKSSIKNP
IIHKKGSILVNRTYEAEEKDQFGNIQIVRKNIPENIYQELYKYFNDKSDKELSDEAAKLKNVVGHHEAATNIVKDYRYTYDKYF
LHMPITINFKANKTGFINDRILQYIAKEKDLHVIGIDRGERNLIYVSVIDTCGNIVEQKSFNIVNGYDYQIKLKQQEGARQIAR
KEWKEIGKIKEIKEGYLSLVIHEISKMVIKYNAIIAMEDLSYGFKKGRFKVERQVYQKFETMLINKLNYLVFKDISITENGGLL
KGYQLTYIPDKLKNVGHQCGCIFYVPAAYTSKIDPTTGFVNIFKFKDLTVDAKREFIKKFDSIRYDSEKNLFCFTEDYNNFITQ
NTVMSKSSWSVYTYGVRIKRRFVNGRFSNESDTIDITKDMEKTLEMTDINWRDGHDLRQDIIDYEIVQHIFEIFRLTVQMRNSL
SELEDRDYDRLISPVLNENNIFYDSAKAGDALPKDADANGAYCIALKGLYEIKQITENWKEDGKFSRDKLKISNKDWFDFIQNK
RYL
ErCas12a-A744P-NT (SEQ ID NO: 131)
atgAATAACGGTACCAATAACTTTCAAAATTTTATCGGGATCTCCTCGTTGCAAAAAACTCTTCGTAATGCTTTAATCCCGACT
GAGACAACACAGCAGTTCATCGTTAAAAACGGCATCATTAAAGAAGATGAGCTGCGCGGCGAGAACCGTCAGATTTTAAAGGAC
ATCATGGACGACTATTACCGTGGGTTCATCTCAGAAACATTAAGCAGCATCGATGATATCGACTGGACCTCACTGTTTGAGAAG
ATGGAGATTCAACTTAAGAATGGAGACAACAAAGACACTTTAATTAAGGAGCAGACGGAATATCGTAAAGCTATCCATAAAAAA
TTTGCAAACGATGACCGTTTCAAAAATATGTTTTCCGCAAAATTGATTAGCGACATTTTACCTGAATTCGTAATCCATAACAAC
AACTATTCCGCATCTGAAAAAGAGGAGAAGACCCAAGTTATCAAACTTTTTTCACGTTTCGCGACATCTTTTAAAGACTACTTT
AAGAATCGTGCGAATTGTTTCAGTGCAGATGATATTTCGTCTAGTTCATGTCACCGTATCGTGAATGACAACGCTGAGATTTTC
TTTTCTAATGCGTTGGTGTATCGCCGCATCGTAAAGTCCTTGTCGAATGATGATATCAACAAAATTAGTGGTGACATGAAAGAC
TCCCTGAAAGAAATGTCATTAGAGGAGATTTACAGCTACGAAAAATACGGAGAGTTCATCACTCAGGAAGGTATCTCCTTTTAC
AACGATATTTGCGGCAAAGTTAATAGTTTCATGAATCTGTATTGTCAGAAGAATAAGGAAAACAAGAATCTGTACAAGTTACAA
AAGCTTCATAAACAGATCTTGTGCATCGCCGACACGTCTTATGAAGTCCCGTATAAATTTGAAAGCGACGAAGAAGTATATCAG
AGTGTGAATGGATTCTTGGACAATATCTCATCAAAACACATTGTTGAACGTTTGCGCAAAATCGGCGACAACTATAACGGATAC
AACTTGGATAAAATTTATATCGTATCAAAATTTTATGAATCAGTATCCCAAAAGACTTACCGTGATTGGGAGACTATTAATACG
GCGTTAGAAATCCATTACAACAACATTCTGCCGGGTAACGGTAAATCGAAAGCGGACAAAGTGAAGAAGGCGGTTAAGAACGAT
CTTCAGAAGTCTATCACGGAGATTAATGAGCTGGTTTCCAATTACAAGTTGTGCTCGGATGATAACATCAAAGCTGAAACCTAT
ATCCATGAAATTTCTCATATTCTTAATAACTTCGAGGCACAAGAATTAAAATATAACCCAGAAATTCATCTGGTTGAGAGCGAA
CTTAAAGCTTCAGAATTAAAAAATGTTTTGGACGTAATTATGAACGCCTTCCATTGGTGCAGCGTGTTTATGACAGAGGAGTTA
GTAGATAAGGATAACAACTTTTATGCAGAATTGGAAGAGATCTATGATGAGATCTATCCAGTGATTTCACTGTATAACTTAGTC
CGTAATTACGTCACTCAGAAGCCGTACTCAACTAAAAAGATCAAGTTAAATTTTGGAATTCCGACATTGGCGGATGGTTGGAGT
AAGTCTAAGGAATACTCAAATAACGCTATTATCTTAATGCGTGACAACCTGTATTACTTGGGTATTTTCAATGCCAAAAATAAG
CCCGATAAAAAAATCATTGAAGGGAATACTTCAGAAAATAAGGGAGATTACAAAAAAATGATTTATAACCTTTTGCCAGGCCCA
AACAAAATGATCCCCAAGGTGTTTTTGAGTAGTAAGACGGGAGTAGAAACATATAAGCCATCAGCGTACATTCTTGAAGGGTAC
AAACAAAATAAACACATCAAGAGCAGCAAGGACTTTGACATTACATTTTGTCATGACTTAATCGACTACTTTAAAAATTGCATT
GCCATTCACCCTGAGTGGAAAAATTTTGGTTTCGACTTCAGTGATACCTCTACCTATGAAGATATCTCTGGTTTTTATCGTGAG
GTAGAACTTCAGGGTTACAAGATCGATTGGACGTACATTTCCGAGAAAGACATTGATCTTTTACAAGAGAAGGGTCAGCTTTAC
TTATTTCAGATCTACAATAAAGACTTTTCGAAAAAATCCACGGGCAACGACAACCTTCATACAATGTACTTAAAGAACCTGTTC
TCTGAAGAAAACTTGAAAGATATCGTGCTTAAATTGAATGGCGAGCCGGAGATTTTTTTCCGTAAAAGCTCGATTAAGAATCCC
ATCATCCACAAGAAAGGCAGCATTCTGGTAAATCGTACCTATGAAGCGGAGGAAAAGGACCAATTTGGTAATATTCAGATTGTC
CGTAAGAACATCCCTGAAAATATCTATCAAGAATTATATAAATATTTCAACGATAAGTCGGACAAGGAACTTAGCGATGAAGCC
GCGAAGTTGAAAAATGTTGTTGGTCACCACGAAGCAGCAACAAACATTGTGAAAGACTATCGCTACACTTACGATAAGTACTTT
TTACATATGCCTATTACGATTAACTTTAAGGCAAATAAGACAGGTTTTATCAACGACCGTATCCTGCAATATATTGCAAAAGAG
AAGGACCTGCATGTCATTGGGATTGATCGCGGTGAACGCAATCTGATTTACGTGAGTGTTATTGATACCTGCGGTAATATTGTT
GAGCAAAAGTCTTTTAATATCGTTAATGGTTACGACTACCAAATTAAGCTTAAACAACAGGAAGGTGCCCGCCAGATCGCCCGT
AAGGAGTGGAAGGAAATCGGAAAAATTAAGGAAATCAAAGAGGGATATCTGAGCTTGGTTATTCATGAAATCTCAAAGATGGTT
ATTAAGTACAACGCCATCATCGCTATGGAAGACTTATCGTATGGGTTTAAAAAGGGTCGTTTCAAAGTTGAGCGCCAGGTCTAC
CAAAAGTTTGAAACGATGCTTATTAATAAATTAAACTACTTGGTTTTCAAAGATATCTCTATTACCGAGAATGGAGGTTTACTG
AAAGGATACCAGTTAACGTATATCCCCGATAAGCTTAAAAACGTGGGCCATCAGTGTGGCTGTATTTTCTATGTGCCCGCGGCA
TATACATCAAAAATTGACCCGACGACGGGTTTCGTTAATATCTTCAAGTTCAAAGATCTGACAGTTGATGCAAAACGCGAATTC
ATTAAGAAGTTCGATAGTATTCGCTATGACTCCGAGAAAAATTTGTTTTGCTTCACTTTTGACTACAATAACTTTATTACTCAG
AATACAGTCATGAGTAAAAGCTCCTGGTCGGTTTACACGTACGGGGTACGCATCAAACGTCGTTTTGTGAATGGTCGTTTTAGT
AATGAGTCGGATACAATTGATATTACCAAGGATATGGAGAAGACTCTGGAAATGACAGACATCAATTGGCGTGATGGACATGAT
TTGCGTCAGGACATTATCGACTATGAGATTGTGCAGCATATTTTCGAAATTTTTCGCCTGACGGTGCAAATGCGTAATTCCTTA
AGCGAACTGGAAGATCGCGACTATGACCGCTTAATTTCTCCTGTGCTGAATGAGAACAACATCTTCTATGACTCAGCGAAAGCC
GGGGACGCTTTGCCAAAGGATGCAGATGCTAACGGTGCATATTGTATTGCTCTGAAAGGCCTTTACGAGATCAAACAAATTACT
GAAAACTGGAAGGAAGATGGAAAGTTTTCCCGTGATAAATTGAAGATCTCTAATAAGGACTGGTTTGACTTTATCCAAAATAAA
CGTTATTTA
ErCas12a-A744P-AA (SEQ ID NO: 132)
MNNGTNNFQNFIGISSLQKTLRNALIPTETTQQFIVKNGIIKEDELRGENRQILKDIMDDYYRGFISETLSSIDDIDWTSLFEK
MEIQLKNGDNKDTLIKEQTEYRKAIHKKFANDDRFKNMFSAKLISDILPEFVIHNNNYSASEKEEKTQVIKLESRFATSFKDYF
KNRANCESADDISSSSCHRIVNDNAEIFFSNALVYRRIVKSLSNDDINKISGDMKDSLKEMSLEEIYSYEKYGEFITQEGISFY
NDICGKVNSFMNLYCQKNKENKNLYKLQKLHKQILCIADTSYEVPYKFESDEEVYQSVNGELDNISSKHIVERLRKIGDNYNGY
NLDKIYIVSKFYESVSQKTYRDWETINTALEIHYNNILPGNGKSKADKVKKAVKNDLQKSITEINELVSNYKLCSDDNIKAETY
IHEISHILNNFEAQELKYNPEIHLVESELKASELKNVLDVIMNAFHWCSVFMTEELVDKDNNFYAELEEIYDEIYPVISLYNLV
RNYVTQKPYSTKKIKLNFGIPTLADGWSKSKEYSNNAIILMRDNLYYLGIFNAKNKPDKKIIEGNTSENKGDYKKMIYNLLPGP
NKMIPKVFLSSKTGVETYKPSAYILEGYKQNKHIKSSKDFDITFCHDLIDYFKNCIAIHPEWKNFGFDFSDTSTYEDISGFYRE
VELQGYKIDWTYISEKDIDLLQEKGQLYLFQIYNKDFSKKSTGNDNLHTMYLKNLFSEENLKDIVLKLNGEPEIFFRKSSIKNP
IIHKKGSILVNRTYEAEEKDQFGNIQIVRKNIPENIYQELYKYENDKSDKELSDEAAKLKNVVGHHEAATNIVKDYRYTYDKYF
LHMPITINFKANKTGFINDRILQYIAKEKDLHVIGIDRGERNLIYVSVIDTCGNIVEQKSFNIVNGYDYQIKLKQQEGARQIAR
KEWKEIGKIKEIKEGYLSLVIHEISKMVIKYNAIIAMEDLSYGFKKGRFKVERQVYQKFETMLINKLNYLVFKDISITENGGLL
KGYQLTYIPDKLKNVGHQCGCIFYVPAAYTSKIDPTTGFVNIFKFKDLTVDAKREFIKKFDSIRYDSEKNLFCFTFDYNNFITQ
NTVMSKSSWSVYTYGVRIKRRFVNGRFSNESDTIDITKDMEKTLEMTDINWRDGHDLRQDIIDYEIVQHIFEIFRLTVQMRNSL
SELEDRDYDRLISPVLNENNIFYDSAKAGDALPKDADANGAYCIALKGLYEIKQITENWKEDGKFSRDKLKISNKDWFDFIQNK
RYL
ErCas12a-A744N-NT (SEQ ID NO: 133)
atgAATAACGGTACCAATAACTTTCAAAATTTTATCGGGATCTCCTCGTTGCAAAAAACTCTTCGTAATGCTTTAATCCCGACT
GAGACAACACAGCAGTTCATCGTTAAAAACGGCATCATTAAAGAAGATGAGCTGCGCGGCGAGAACCGTCAGATTTTAAAGGAC
ATCATGGACGACTATTACCGTGGGTTCATCTCAGAAACATTAAGCAGCATCGATGATATCGACTGGACCTCACTGTTTGAGAAG
ATGGAGATTCAACTTAAGAATGGAGACAACAAAGACACTTTAATTAAGGAGCAGACGGAATATCGTAAAGCTATCCATAAAAAA
TTTGCAAACGATGACCGTTTCAAAAATATGTTTTCCGCAAAATTGATTAGCGACATTTTACCTGAATTCGTAATCCATAACAAC
AACTATTCCGCATCTGAAAAAGAGGAGAAGACCCAAGTTATCAAACTTTTTTCACGTTTCGCGACATCTTTTAAAGACTACTTT
AAGAATCGTGCGAATTGTTTCAGTGCAGATGATATTTCGTCTAGTTCATGTCACCGTATCGTGAATGACAACGCTGAGATTTTC
TTTTCTAATGCGTTGGTGTATCGCCGCATCGTAAAGTCCTTGTCGAATGATGATATCAACAAAATTAGTGGTGACATGAAAGAC
TCCCTGAAAGAAATGTCATTAGAGGAGATTTACAGCTACGAAAAATACGGAGAGTTCATCACTCAGGAAGGTATCTCCTTTTAC
AACGATATTTGCGGCAAAGTTAATAGTTTCATGAATCTGTATTGTCAGAAGAATAAGGAAAACAAGAATCTGTACAAGTTACAA
AAGCTTCATAAACAGATCTTGTGCATCGCCGACACGTCTTATGAAGTCCCGTATAAATTTGAAAGCGACGAAGAAGTATATCAG
AGTGTGAATGGATTCTTGGACAATATCTCATCAAAACACATTGTTGAACGTTTGCGCAAAATCGGCGACAACTATAACGGATAC
AACTTGGATAAAATTTATATCGTATCAAAATTTTATGAATCAGTATCCCAAAAGACTTACCGTGATTGGGAGACTATTAATACG
GCGTTAGAAATCCATTACAACAACATTCTGCCGGGTAACGGTAAATCGAAAGCGGACAAAGTGAAGAAGGCGGTTAAGAACGAT
CTTCAGAAGTCTATCACGGAGATTAATGAGCTGGTTTCCAATTACAAGTTGTGCTCGGATGATAACATCAAAGCTGAAACCTAT
ATCCATGAAATTTCTCATATTCTTAATAACTTCGAGGCACAAGAATTAAAATATAACCCAGAAATTCATCTGGTTGAGAGCGAA
CTTAAAGCTTCAGAATTAAAAAATGTTTTGGACGTAATTATGAACGCCTTCCATTGGTGCAGCGTGTTTATGACAGAGGAGTTA
GTAGATAAGGATAACAACTTTTATGCAGAATTGGAAGAGATCTATGATGAGATCTATCCAGTGATTTCACTGTATAACTTAGTC
CGTAATTACGTCACTCAGAAGCCGTACTCAACTAAAAAGATCAAGTTAAATTTTGGAATTCCGACATTGGCGGATGGTTGGAGT
AAGTCTAAGGAATACTCAAATAACGCTATTATCTTAATGCGTGACAACCTGTATTACTTGGGTATTTTCAATGCCAAAAATAAG
CCCGATAAAAAAATCATTGAAGGGAATACTTCAGAAAATAAGGGAGATTACAAAAAAATGATTTATAACCTTTTGCCAGGCCCA
AACAAAATGATCCCCAAGGTGTTTTTGAGTAGTAAGACGGGAGTAGAAACATATAAGCCATCAGCGTACATTCTTGAAGGGTAC
AAACAAAATAAACACATCAAGAGCAGCAAGGACTTTGACATTACATTTTGTCATGACTTAATCGACTACTTTAAAAATTGCATT
GCCATTCACCCTGAGTGGAAAAATTTTGGTTTCGACTTCAGTGATACCTCTACCTATGAAGATATCTCTGGTTTTTATCGTGAG
GTAGAACTTCAGGGTTACAAGATCGATTGGACGTACATTTCCGAGAAAGACATTGATCTTTTACAAGAGAAGGGTCAGCTTTAC
TTATTTCAGATCTACAATAAAGACTTTTCGAAAAAATCCACGGGCAACGACAACCTTCATACAATGTACTTAAAGAACCTGTTC
TCTGAAGAAAACTTGAAAGATATCGTGCTTAAATTGAATGGCGAGAACGAGATTTTTTTCCGTAAAAGCTCGATTAAGAATCCC
ATCATCCACAAGAAAGGCAGCATTCTGGTAAATCGTACCTATGAAGCGGAGGAAAAGGACCAATTTGGTAATATTCAGATTGTC
CGTAAGAACATCCCTGAAAATATCTATCAAGAATTATATAAATATTTCAACGATAAGTCGGACAAGGAACTTAGCGATGAAGCC
GCGAAGTTGAAAAATGTTGTTGGTCACCACGAAGCAGCAACAAACATTGTGAAAGACTATCGCTACACTTACGATAAGTACTTT
TTACATATGCCTATTACGATTAACTTTAAGGCAAATAAGACAGGTTTTATCAACGACCGTATCCTGCAATATATTGCAAAAGAG
AAGGACCTGCATGTCATTGGGATTGATCGCGGTGAACGCAATCTGATTTACGTGAGTGTTATTGATACCTGCGGTAATATTGTT
GAGCAAAAGTCTTTTAATATCGTTAATGGTTACGACTACCAAATTAAGCTTAAACAACAGGAAGGTGCCCGCCAGATCGCCCGT
AAGGAGTGGAAGGAAATCGGAAAAATTAAGGAAATCAAAGAGGGATATCTGAGCTTGGTTATTCATGAAATCTCAAAGATGGTT
ATTAAGTACAACGCCATCATCGCTATGGAAGACTTATCGTATGGGTTTAAAAAGGGTCGTTTCAAAGTTGAGCGCCAGGTCTAC
CAAAAGTTTGAAACGATGCTTATTAATAAATTAAACTACTTGGTTTTCAAAGATATCTCTATTACCGAGAATGGAGGTTTACTG
AAAGGATACCAGTTAACGTATATCCCCGATAAGCTTAAAAACGTGGGCCATCAGTGTGGCTGTATTTTCTATGTGCCCGCGGCA
TATACATCAAAAATTGACCCGACGACGGGTTTCGTTAATATCTTCAAGTTCAAAGATCTGACAGTTGATGCAAAACGCGAATTC
ATTAAGAAGTTCGATAGTATTCGCTATGACTCCGAGAAAAATTTGTTTTGCTTCACTTTTGACTACAATAACTTTATTACTCAG
AATACAGTCATGAGTAAAAGCTCCTGGTCGGTTTACACGTACGGGGTACGCATCAAACGTCGTTTTGTGAATGGTCGTTTTAGT
AATGAGTCGGATACAATTGATATTACCAAGGATATGGAGAAGACTCTGGAAATGACAGACATCAATTGGCGTGATGGACATGAT
TTGCGTCAGGACATTATCGACTATGAGATTGTGCAGCATATTTTCGAAATTTTTCGCCTGACGGTGCAAATGCGTAATTCCTTA
AGCGAACTGGAAGATCGCGACTATGACCGCTTAATTTCTCCTGTGCTGAATGAGAACAACATCTTCTATGACTCAGCGAAAGCC
GGGGACGCTTTGCCAAAGGATGCAGATGCTAACGGTGCATATTGTATTGCTCTGAAAGGCCTTTACGAGATCAAACAAATTACT
GAAAACTGGAAGGAAGATGGAAAGTTTTCCCGTGATAAATTGAAGATCTCTAATAAGGACTGGTTTGACTTTATCCAAAATAAA
CGTTATTTA
ErCas12a-A744N-AA (SEQ ID NO: 134)
MNNGTNNFQNFIGISSLQKTLRNALIPTETTQQFIVKNGIIKEDELRGENRQILKDIMDDYYRGFISETLSSIDDIDWTSLFEK
MEIQLKNGDNKDTLIKEQTEYRKAIHKKFANDDRFKNMFSAKLISDILPEFVIHNNNYSASEKEEKTQVIKLESRFATSFKDYF
KNRANCFSADDISSSSCHRIVNDNAEIFFSNALVYRRIVKSLSNDDINKISGDMKDSLKEMSLEEIYSYEKYGEFITQEGISFY
NDICGKVNSFMNLYCQKNKENKNLYKLQKLHKQILCIADTSYEVPYKFESDEEVYQSVNGELDNISSKHIVERLRKIGDNYNGY
NLDKIYIVSKFYESVSQKTYRDWETINTALEIHYNNILPGNGKSKADKVKKAVKNDLQKSITEINELVSNYKLCSDDNIKAETY
IHEISHILNNFEAQELKYNPEIHLVESELKASELKNVLDVIMNAFHWCSVFMTEELVDKDNNFYAELEEIYDEIYPVISLYNLV
RNYVTQKPYSTKKIKLNFGIPTLADGWSKSKEYSNNAIILMRDNLYYLGIFNAKNKPDKKIIEGNTSENKGDYKKMIYNLLPGP
NKMIPKVFLSSKTGVETYKPSAYILEGYKQNKHIKSSKDFDITFCHDLIDYFKNCIAIHPEWKNFGFDFSDTSTYEDISGFYRE
VELQGYKIDWTYISEKDIDLLQEKGQLYLFQIYNKDFSKKSTGNDNLHTMYLKNLFSEENLKDIVLKLNGENEIFFRKSSIKNP
IIHKKGSILVNRTYEAEEKDQFGNIQIVRKNIPENIYQELYKYFNDKSDKELSDEAAKLKNVVGHHEAATNIVKDYRYTYDKYF
LHMPITINFKANKTGFINDRILQYIAKEKDLHVIGIDRGERNLIYVSVIDTCGNIVEQKSFNIVNGYDYQIKLKQQEGARQIAR
KEWKEIGKIKEIKEGYLSLVIHEISKMVIKYNAIIAMEDLSYGFKKGRFKVERQVYQKFETMLINKLNYLVFKDISITENGGLL
KGYQLTYIPDKLKNVGHQCGCIFYVPAAYTSKIDPTTGFVNIFKFKDLTVDAKREFIKKFDSIRYDSEKNLFCFTFDYNNFITQ
NTVMSKSSWSVYTYGVRIKRRFVNGRFSNESDTIDITKDMEKTLEMTDINWRDGHDLRQDIIDYEIVQHIFEIFRLTVQMRNSL
SELEDRDYDRLISPVLNENNIFYDSAKAGDALPKDADANGAYCIALKGLYEIKQITENWKEDGKFSRDKLKISNKDWEDFIQNK
RYL
ErCas12a-F748A-NT (SEQ ID NO: 135)
atgAATAACGGTACCAATAACTTTCAAAATTTTATCGGGATCTCCTCGTTGCAAAAAACTCTTCGTAATGCTTTAATCCCGACT
GAGACAACACAGCAGTTCATCGTTAAAAACGGCATCATTAAAGAAGATGAGCTGCGCGGCGAGAACCGTCAGATTTTAAAGGAC
ATCATGGACGACTATTACCGTGGGTTCATCTCAGAAACATTAAGCAGCATCGATGATATCGACTGGACCTCACTGTTTGAGAAG
ATGGAGATTCAACTTAAGAATGGAGACAACAAAGACACTTTAATTAAGGAGCAGACGGAATATCGTAAAGCTATCCATAAAAAA
TTTGCAAACGATGACCGTTTCAAAAATATGTTTTCCGCAAAATTGATTAGCGACATTTTACCTGAATTCGTAATCCATAACAAC
AACTATTCCGCATCTGAAAAAGAGGAGAAGACCCAAGTTATCAAACTTTTTTCACGTTTCGCGACATCTTTTAAAGACTACTTT
AAGAATCGTGCGAATTGTTTCAGTGCAGATGATATTTCGTCTAGTTCATGTCACCGTATCGTGAATGACAACGCTGAGATTTTC
TTTTCTAATGCGTTGGTGTATCGCCGCATCGTAAAGTCCTTGTCGAATGATGATATCAACAAAATTAGTGGTGACATGAAAGAC
TCCCTGAAAGAAATGTCATTAGAGGAGATTTACAGCTACGAAAAATACGGAGAGTTCATCACTCAGGAAGGTATCTCCTTTTAC
AACGATATTTGCGGCAAAGTTAATAGTTTCATGAATCTGTATTGTCAGAAGAATAAGGAAAACAAGAATCTGTACAAGTTACAA
AAGCTTCATAAACAGATCTTGTGCATCGCCGACACGTCTTATGAAGTCCCGTATAAATTTGAAAGCGACGAAGAAGTATATCAG
AGTGTGAATGGATTCTTGGACAATATCTCATCAAAACACATTGTTGAACGTTTGCGCAAAATCGGCGACAACTATAACGGATAC
AACTTGGATAAAATTTATATCGTATCAAAATTTTATGAATCAGTATCCCAAAAGACTTACCGTGATTGGGAGACTATTAATACG
GCGTTAGAAATCCATTACAACAACATTCTGCCGGGTAACGGTAAATCGAAAGCGGACAAAGTGAAGAAGGCGGTTAAGAACGAT
CTTCAGAAGTCTATCACGGAGATTAATGAGCTGGTTTCCAATTACAAGTTGTGCTCGGATGATAACATCAAAGCTGAAACCTAT
ATCCATGAAATTTCTCATATTCTTAATAACTTCGAGGCACAAGAATTAAAATATAACCCAGAAATTCATCTGGTTGAGAGCGAA
CTTAAAGCTTCAGAATTAAAAAATGTTTTGGACGTAATTATGAACGCCTTCCATTGGTGCAGCGTGTTTATGACAGAGGAGTTA
GTAGATAAGGATAACAACTTTTATGCAGAATTGGAAGAGATCTATGATGAGATCTATCCAGTGATTTCACTGTATAACTTAGTC
CGTAATTACGTCACTCAGAAGCCGTACTCAACTAAAAAGATCAAGTTAAATTTTGGAATTCCGACATTGGCGGATGGTTGGAGT
AAGTCTAAGGAATACTCAAATAACGCTATTATCTTAATGCGTGACAACCTGTATTACTTGGGTATTTTCAATGCCAAAAATAAG
CCCGATAAAAAAATCATTGAAGGGAATACTTCAGAAAATAAGGGAGATTACAAAAAAATGATTTATAACCTTTTGCCAGGCCCA
AACAAAATGATCCCCAAGGTGTTTTTGAGTAGTAAGACGGGAGTAGAAACATATAAGCCATCAGCGTACATTCTTGAAGGGTAC
AAACAAAATAAACACATCAAGAGCAGCAAGGACTTTGACATTACATTTTGTCATGACTTAATCGACTACTTTAAAAATTGCATT
GCCATTCACCCTGAGTGGAAAAATTTTGGTTTCGACTTCAGTGATACCTCTACCTATGAAGATATCTCTGGTTTTTATCGTGAG
GTAGAACTTCAGGGTTACAAGATCGATTGGACGTACATTTCCGAGAAAGACATTGATCTTTTACAAGAGAAGGGTCAGCTTTAC
TTATTTCAGATCTACAATAAAGACTTTTCGAAAAAATCCACGGGCAACGACAACCTTCATACAATGTACTTAAAGAACCTGTTC
TCTGAAGAAAACTTGAAAGATATCGTGCTTAAATTGAATGGCGAGGCCGAGATTTTTGCGCGTAAAAGCTCGATTAAGAATCCC
ATCATCCACAAGAAAGGCAGCATTCTGGTAAATCGTACCTATGAAGCGGAGGAAAAGGACCAATTTGGTAATATTCAGATTGTC
CGTAAGAACATCCCTGAAAATATCTATCAAGAATTATATAAATATTTCAACGATAAGTCGGACAAGGAACTTAGCGATGAAGCC
GCGAAGTTGAAAAATGTTGTTGGTCACCACGAAGCAGCAACAAACATTGTGAAAGACTATCGCTACACTTACGATAAGTACTTT
TTACATATGCCTATTACGATTAACTTTAAGGCAAATAAGACAGGTTTTATCAACGACCGTATCCTGCAATATATTGCAAAAGAG
AAGGACCTGCATGTCATTGGGATTGATCGCGGTGAACGCAATCTGATTTACGTGAGTGTTATTGATACCTGCGGTAATATTGTT
GAGCAAAAGTCTTTTAATATCGTTAATGGTTACGACTACCAAATTAAGCTTAAACAACAGGAAGGTGCCCGCCAGATCGCCCGT
AAGGAGTGGAAGGAAATCGGAAAAATTAAGGAAATCAAAGAGGGATATCTGAGCTTGGTTATTCATGAAATCTCAAAGATGGTT
ATTAAGTACAACGCCATCATCGCTATGGAAGACTTATCGTATGGGTTTAAAAAGGGTCGTTTCAAAGTTGAGCGCCAGGTCTAC
CAAAAGTTTGAAACGATGCTTATTAATAAATTAAACTACTTGGTTTTCAAAGATATCTCTATTACCGAGAATGGAGGTTTACTG
AAAGGATACCAGTTAACGTATATCCCCGATAAGCTTAAAAACGTGGGCCATCAGTGTGGCTGTATTTTCTATGTGCCCGCGGCA
TATACATCAAAAATTGACCCGACGACGGGTTTCGTTAATATCTTCAAGTTCAAAGATCTGACAGTTGATGCAAAACGCGAATTC
ATTAAGAAGTTCGATAGTATTCGCTATGACTCCGAGAAAAATTTGTTTTGCTTCACTTTTGACTACAATAACTTTATTACTCAG
AATACAGTCATGAGTAAAAGCTCCTGGTCGGTTTACACGTACGGGGTACGCATCAAACGTCGTTTTGTGAATGGTCGTTTTAGT
AATGAGTCGGATACAATTGATATTACCAAGGATATGGAGAAGACTCTGGAAATGACAGACATCAATTGGCGTGATGGACATGAT
TTGCGTCAGGACATTATCGACTATGAGATTGTGCAGCATATTTTCGAAATTTTTCGCCTGACGGTGCAAATGCGTAATTCCTTA
AGCGAACTGGAAGATCGCGACTATGACCGCTTAATTTCTCCTGTGCTGAATGAGAACAACATCTTCTATGACTCAGCGAAAGCC
GGGGACGCTTTGCCAAAGGATGCAGATGCTAACGGTGCATATTGTATTGCTCTGAAAGGCCTTTACGAGATCAAACAAATTACT
GAAAACTGGAAGGAAGATGGAAAGTTTTCCCGTGATAAATTGAAGATCTCTAATAAGGACTGGTTTGACTTTATCCAAAATAAA
CGTTATTTA
ErCas12a-F748A-AA (SEQ ID NO: 136)
MNNGTNNFQNFIGISSLQKTLRNALIPTETTQQFIVKNGIIKEDELRGENRQILKDIMDDYYRGFISETLSSIDDIDWTSLFEK
MEIQLKNGDNKDTLIKEQTEYRKAIHKKFANDDRFKNMFSAKLISDILPEFVIHNNNYSASEKEEKTQVIKLFSRFATSFKDYF
KNRANCFSADDISSSSCHRIVNDNAEIFFSNALVYRRIVKSLSNDDINKISGDMKDSLKEMSLEEIYSYEKYGEFITQEGISFY
NDICGKVNSFMNLYCQKNKENKNLYKLQKLHKQILCIADTSYEVPYKFESDEEVYQSVNGELDNISSKHIVERLRKIGDNYNGY
NLDKIYIVSKFYESVSQKTYRDWETINTALEIHYNNILPGNGKSKADKVKKAVKNDLQKSITEINELVSNYKLCSDDNIKAETY
IHEISHILNNFEAQELKYNPEIHLVESELKASELKNVLDVIMNAFHWCSVFMTEELVDKDNNFYAELEEIYDEIYPVISLYNLV
RNYVTQKPYSTKKIKLNFGIPTLADGWSKSKEYSNNAIILMRDNLYYLGIFNAKNKPDKKIIEGNTSENKGDYKKMIYNLLPGP
NKMIPKVFLSSKTGVETYKPSAYILEGYKQNKHIKSSKDFDITFCHDLIDYFKNCIAIHPEWKNFGFDFSDTSTYEDISGFYRE
VELQGYKIDWTYISEKDIDLLQEKGQLYLFQIYNKDFSKKSTGNDNLHTMYLKNLFSEENLKDIVLKLNGEAEIFARKSSIKNP
IIHKKGSILVNRTYEAEEKDQFGNIQIVRKNIPENIYQELYKYFNDKSDKELSDEAAKLKNVVGHHEAATNIVKDYRYTYDKYF
LHMPITINFKANKTGFINDRILQYIAKEKDLHVIGIDRGERNLIYVSVIDTCGNIVEQKSFNIVNGYDYQIKLKQQEGARQIAR
KEWKEIGKIKEIKEGYLSLVIHEISKMVIKYNAIIAMEDLSYGFKKGRFKVERQVYQKFETMLINKLNYLVFKDISITENGGLL
KGYQLTYIPDKLKNVGHQCGCIFYVPAAYTSKIDPTTGFVNIFKFKDLTVDAKREFIKKFDSIRYDSEKNLFCFTEDYNNFITQ
NTVMSKSSWSVYTYGVRIKRRFVNGRFSNESDTIDITKDMEKTLEMTDINWRDGHDLRQDIIDYEIVQHIFEIFRLTVQMRNSL
SELEDRDYDRLISPVLNENNIFYDSAKAGDALPKDADANGAYCIALKGLYEIKQITENWKEDGKFSRDKLKISNKDWFDFIQNK
RYL
ErCas12a-S751A-NT (SEQ ID NO: 137)
atgAATAACGGTACCAATAACTTTCAAAATTTTATCGGGATCTCCTCGTTGCAAAAAACTCTTCGTAATGCTTTAATCCCGACT
GAGACAACACAGCAGTTCATCGTTAAAAACGGCATCATTAAAGAAGATGAGCTGCGCGGCGAGAACCGTCAGATTTTAAAGGAC
ATCATGGACGACTATTACCGTGGGTTCATCTCAGAAACATTAAGCAGCATCGATGATATCGACTGGACCTCACTGTTTGAGAAG
ATGGAGATTCAACTTAAGAATGGAGACAACAAAGACACTTTAATTAAGGAGCAGACGGAATATCGTAAAGCTATCCATAAAAAA
TTTGCAAACGATGACCGTTTCAAAAATATGTTTTCCGCAAAATTGATTAGCGACATTTTACCTGAATTCGTAATCCATAACAAC
AACTATTCCGCATCTGAAAAAGAGGAGAAGACCCAAGTTATCAAACTTTTTTCACGTTTCGCGACATCTTTTAAAGACTACTTT
AAGAATCGTGCGAATTGTTTCAGTGCAGATGATATTTCGTCTAGTTCATGTCACCGTATCGTGAATGACAACGCTGAGATTTTC
TTTTCTAATGCGTTGGTGTATCGCCGCATCGTAAAGTCCTTGTCGAATGATGATATCAACAAAATTAGTGGTGACATGAAAGAC
TCCCTGAAAGAAATGTCATTAGAGGAGATTTACAGCTACGAAAAATACGGAGAGTTCATCACTCAGGAAGGTATCTCCTTTTAC
AACGATATTTGCGGCAAAGTTAATAGTTTCATGAATCTGTATTGTCAGAAGAATAAGGAAAACAAGAATCTGTACAAGTTACAA
AAGCTTCATAAACAGATCTTGTGCATCGCCGACACGTCTTATGAAGTCCCGTATAAATTTGAAAGCGACGAAGAAGTATATCAG
AGTGTGAATGGATTCTTGGACAATATCTCATCAAAACACATTGTTGAACGTTTGCGCAAAATCGGCGACAACTATAACGGATAC
AACTTGGATAAAATTTATATCGTATCAAAATTTTATGAATCAGTATCCCAAAAGACTTACCGTGATTGGGAGACTATTAATACG
GCGTTAGAAATCCATTACAACAACATTCTGCCGGGTAACGGTAAATCGAAAGCGGACAAAGTGAAGAAGGCGGTTAAGAACGAT
CTTCAGAAGTCTATCACGGAGATTAATGAGCTGGTTTCCAATTACAAGTTGTGCTCGGATGATAACATCAAAGCTGAAACCTAT
ATCCATGAAATTTCTCATATTCTTAATAACTTCGAGGCACAAGAATTAAAATATAACCCAGAAATTCATCTGGTTGAGAGCGAA
CTTAAAGCTTCAGAATTAAAAAATGTTTTGGACGTAATTATGAACGCCTTCCATTGGTGCAGCGTGTTTATGACAGAGGAGTTA
GTAGATAAGGATAACAACTTTTATGCAGAATTGGAAGAGATCTATGATGAGATCTATCCAGTGATTTCACTGTATAACTTAGTC
CGTAATTACGTCACTCAGAAGCCGTACTCAACTAAAAAGATCAAGTTAAATTTTGGAATTCCGACATTGGCGGATGGTTGGAGT
AAGTCTAAGGAATACTCAAATAACGCTATTATCTTAATGCGTGACAACCTGTATTACTTGGGTATTTTCAATGCCAAAAATAAG
CCCGATAAAAAAATCATTGAAGGGAATACTTCAGAAAATAAGGGAGATTACAAAAAAATGATTTATAACCTTTTGCCAGGCCCA
AACAAAATGATCCCCAAGGTGTTTTTGAGTAGTAAGACGGGAGTAGAAACATATAAGCCATCAGCGTACATTCTTGAAGGGTAC
AAACAAAATAAACACATCAAGAGCAGCAAGGACTTTGACATTACATTTTGTCATGACTTAATCGACTACTTTAAAAATTGCATT
GCCATTCACCCTGAGTGGAAAAATTTTGGTTTCGACTTCAGTGATACCTCTACCTATGAAGATATCTCTGGTTTTTATCGTGAG
GTAGAACTTCAGGGTTACAAGATCGATTGGACGTACATTTCCGAGAAAGACATTGATCTTTTACAAGAGAAGGGTCAGCTTTAC
TTATTTCAGATCTACAATAAAGACTTTTCGAAAAAATCCACGGGCAACGACAACCTTCATACAATGTACTTAAAGAACCTGTTC
TCTGAAGAAAACTTGAAAGATATCGTGCTTAAATTGAATGGCGAGGCCGAGATTTTTTTCCGTAAAGCGTCGATTAAGAATCCC
ATCATCCACAAGAAAGGCAGCATTCTGGTAAATCGTACCTATGAAGCGGAGGAAAAGGACCAATTTGGTAATATTCAGATTGTC
CGTAAGAACATCCCTGAAAATATCTATCAAGAATTATATAAATATTTCAACGATAAGTCGGACAAGGAACTTAGCGATGAAGCC
GCGAAGTTGAAAAATGTTGTTGGTCACCACGAAGCAGCAACAAACATTGTGAAAGACTATCGCTACACTTACGATAAGTACTTT
TTACATATGCCTATTACGATTAACTTTAAGGCAAATAAGACAGGTTTTATCAACGACCGTATCCTGCAATATATTGCAAAAGAG
AAGGACCTGCATGTCATTGGGATTGATCGCGGTGAACGCAATCTGATTTACGTGAGTGTTATTGATACCTGCGGTAATATTGTT
GAGCAAAAGTCTTTTAATATCGTTAATGGTTACGACTACCAAATTAAGCTTAAACAACAGGAAGGTGCCCGCCAGATCGCCCGT
AAGGAGTGGAAGGAAATCGGAAAAATTAAGGAAATCAAAGAGGGATATCTGAGCTTGGTTATTCATGAAATCTCAAAGATGGTT
ATTAAGTACAACGCCATCATCGCTATGGAAGACTTATCGTATGGGTTTAAAAAGGGTCGTTTCAAAGTTGAGCGCCAGGTCTAC
CAAAAGTTTGAAACGATGCTTATTAATAAATTAAACTACTTGGTTTTCAAAGATATCTCTATTACCGAGAATGGAGGTTTACTG
AAAGGATACCAGTTAACGTATATCCCCGATAAGCTTAAAAACGTGGGCCATCAGTGTGGCTGTATTTTCTATGTGCCCGCGGCA
TATACATCAAAAATTGACCCGACGACGGGTTTCGTTAATATCTTCAAGTTCAAAGATCTGACAGTTGATGCAAAACGCGAATTC
ATTAAGAAGTTCGATAGTATTCGCTATGACTCCGAGAAAAATTTGTTTTGCTTCACTTTTGACTACAATAACTTTATTACTCAG
AATACAGTCATGAGTAAAAGCTCCTGGTCGGTTTACACGTACGGGGTACGCATCAAACGTCGTTTTGTGAATGGTCGTTTTAGT
AATGAGTCGGATACAATTGATATTACCAAGGATATGGAGAAGACTCTGGAAATGACAGACATCAATTGGCGTGATGGACATGAT
TTGCGTCAGGACATTATCGACTATGAGATTGTGCAGCATATTTTCGAAATTTTTCGCCTGACGGTGCAAATGCGTAATTCCTTA
AGCGAACTGGAAGATCGCGACTATGACCGCTTAATTTCTCCTGTGCTGAATGAGAACAACATCTTCTATGACTCAGCGAAAGCC
GGGGACGCTTTGCCAAAGGATGCAGATGCTAACGGTGCATATTGTATTGCTCTGAAAGGCCTTTACGAGATCAAACAAATTACT
GAAAACTGGAAGGAAGATGGAAAGTTTTCCCGTGATAAATTGAAGATCTCTAATAAGGACTGGTTTGACTTTATCCAAAATAAA
CGTTATTTA
ErCas12a-S751A-AA (SEQ ID NO: 138)
MNNGTNNFQNFIGISSLQKTLRNALIPTETTQQFIVKNGIIKEDELRGENRQILKDIMDDYYRGFISETLSSIDDIDWTSLFEK
MEIQLKNGDNKDTLIKEQTEYRKAIHKKFANDDRFKNMFSAKLISDILPEFVIHNNNYSASEKEEKTQVIKLFSRFATSFKDYF
KNRANCESADDISSSSCHRIVNDNAEIFFSNALVYRRIVKSLSNDDINKISGDMKDSLKEMSLEEIYSYEKYGEFITQEGISFY
NDICGKVNSFMNLYCQKNKENKNLYKLQKLHKQILCIADTSYEVPYKFESDEEVYQSVNGELDNISSKHIVERLRKIGDNYNGY
NLDKIYIVSKFYESVSQKTYRDWETINTALEIHYNNILPGNGKSKADKVKKAVKNDLQKSITEINELVSNYKLCSDDNIKAETY
IHEISHILNNFEAQELKYNPEIHLVESELKASELKNVLDVIMNAFHWCSVFMTEELVDKDNNFYAELEEIYDEIYPVISLYNLV
RNYVTQKPYSTKKIKLNFGIPTLADGWSKSKEYSNNAIILMRDNLYYLGIFNAKNKPDKKIIEGNTSENKGDYKKMIYNLLPGP
NKMIPKVFLSSKTGVETYKPSAYILEGYKQNKHIKSSKDFDITFCHDLIDYFKNCIAIHPEWKNFGFDFSDTSTYEDISGFYRE
VELQGYKIDWTYISEKDIDLLQEKGQLYLFQIYNKDFSKKSTGNDNLHTMYLKNLFSEENLKDIVLKLNGEAEIFFRKASIKNP
IIHKKGSILVNRTYEAEEKDQFGNIQIVRKNIPENIYQELYKYFNDKSDKELSDEAAKLKNVVGHHEAATNIVKDYRYTYDKYF
LHMPITINFKANKTGFINDRILQYIAKEKDLHVIGIDRGERNLIYVSVIDTCGNIVEQKSENIVNGYDYQIKLKQQEGARQIAR
KEWKEIGKIKEIKEGYLSLVIHEISKMVIKYNAIIAMEDLSYGFKKGRFKVERQVYQKFETMLINKLNYLVFKDISITENGGLL
KGYQLTYIPDKLKNVGHQCGCIFYVPAAYTSKIDPTTGFVNIFKFKDLTVDAKREFIKKFDSIRYDSEKNLFCFTFDYNNFITQ
NTVMSKSSWSVYTYGVRIKRRFVNGRFSNESDTIDITKDMEKTLEMTDINWRDGHDLRQDIIDYEIVQHIFEIFRLTVQMRNSL
SELEDRDYDRLISPVLNENNIFYDSAKAGDALPKDADANGAYCIALKGLYEIKQITENWKEDGKFSRDKLKISNKDWFDFIQNK
RYL
ErCas12a-K754G-NT (SEQ ID NO: 139)
atgAATAACGGTACCAATAACTTTCAAAATTTTATCGGGATCTCCTCGTTGCAAAAAACTCTTCGTAATGCTTTAATCCCGACT
GAGACAACACAGCAGTTCATCGTTAAAAACGGCATCATTAAAGAAGATGAGCTGCGCGGCGAGAACCGTCAGATTTTAAAGGAC
ATCATGGACGACTATTACCGTGGGTTCATCTCAGAAACATTAAGCAGCATCGATGATATCGACTGGACCTCACTGTTTGAGAAG
ATGGAGATTCAACTTAAGAATGGAGACAACAAAGACACTTTAATTAAGGAGCAGACGGAATATCGTAAAGCTATCCATAAAAAA
TTTGCAAACGATGACCGTTTCAAAAATATGTTTTCCGCAAAATTGATTAGCGACATTTTACCTGAATTCGTAATCCATAACAAC
AACTATTCCGCATCTGAAAAAGAGGAGAAGACCCAAGTTATCAAACTTTTTTCACGTTTCGCGACATCTTTTAAAGACTACTTT
AAGAATCGTGCGAATTGTTTCAGTGCAGATGATATTTCGTCTAGTTCATGTCACCGTATCGTGAATGACAACGCTGAGATTTTC
TTTTCTAATGCGTTGGTGTATCGCCGCATCGTAAAGTCCTTGTCGAATGATGATATCAACAAAATTAGTGGTGACATGAAAGAC
TCCCTGAAAGAAATGTCATTAGAGGAGATTTACAGCTACGAAAAATACGGAGAGTTCATCACTCAGGAAGGTATCTCCTTTTAC
AACGATATTTGCGGCAAAGTTAATAGTTTCATGAATCTGTATTGTCAGAAGAATAAGGAAAACAAGAATCTGTACAAGTTACAA
AAGCTTCATAAACAGATCTTGTGCATCGCCGACACGTCTTATGAAGTCCCGTATAAATTTGAAAGCGACGAAGAAGTATATCAG
AGTGTGAATGGATTCTTGGACAATATCTCATCAAAACACATTGTTGAACGTTTGCGCAAAATCGGCGACAACTATAACGGATAC
AACTTGGATAAAATTTATATCGTATCAAAATTTTATGAATCAGTATCCCAAAAGACTTACCGTGATTGGGAGACTATTAATACG
GCGTTAGAAATCCATTACAACAACATTCTGCCGGGTAACGGTAAATCGAAAGCGGACAAAGTGAAGAAGGCGGTTAAGAACGAT
CTTCAGAAGTCTATCACGGAGATTAATGAGCTGGTTTCCAATTACAAGTTGTGCTCGGATGATAACATCAAAGCTGAAACCTAT
ATCCATGAAATTTCTCATATTCTTAATAACTTCGAGGCACAAGAATTAAAATATAACCCAGAAATTCATCTGGTTGAGAGCGAA
CTTAAAGCTTCAGAATTAAAAAATGTTTTGGACGTAATTATGAACGCCTTCCATTGGTGCAGCGTGTTTATGACAGAGGAGTTA
GTAGATAAGGATAACAACTTTTATGCAGAATTGGAAGAGATCTATGATGAGATCTATCCAGTGATTTCACTGTATAACTTAGTC
CGTAATTACGTCACTCAGAAGCCGTACTCAACTAAAAAGATCAAGTTAAATTTTGGAATTCCGACATTGGCGGATGGTTGGAGT
AAGTCTAAGGAATACTCAAATAACGCTATTATCTTAATGCGTGACAACCTGTATTACTTGGGTATTTTCAATGCCAAAAATAAG
CCCGATAAAAAAATCATTGAAGGGAATACTTCAGAAAATAAGGGAGATTACAAAAAAATGATTTATAACCTTTTGCCAGGCCCA
AACAAAATGATCCCCAAGGTGTTTTTGAGTAGTAAGACGGGAGTAGAAACATATAAGCCATCAGCGTACATTCTTGAAGGGTAC
AAACAAAATAAACACATCAAGAGCAGCAAGGACTTTGACATTACATTTTGTCATGACTTAATCGACTACTTTAAAAATTGCATT
GCCATTCACCCTGAGTGGAAAAATTTTGGTTTCGACTTCAGTGATACCTCTACCTATGAAGATATCTCTGGTTTTTATCGTGAG
GTAGAACTTCAGGGTTACAAGATCGATTGGACGTACATTTCCGAGAAAGACATTGATCTTTTACAAGAGAAGGGTCAGCTTTAC
TTATTTCAGATCTACAATAAAGACTTTTCGAAAAAATCCACGGGCAACGACAACCTTCATACAATGTACTTAAAGAACCTGTTC
TCTGAAGAAAACTTGAAAGATATCGTGCTTAAATTGAATGGCGAGGCCGAGATTTTTTTCCGTAAAAGCTCGATTGGCAATCCC
ATCATCCACAAGAAAGGCAGCATTCTGGTAAATCGTACCTATGAAGCGGAGGAAAAGGACCAATTTGGTAATATTCAGATTGTC
CGTAAGAACATCCCTGAAAATATCTATCAAGAATTATATAAATATTTCAACGATAAGTCGGACAAGGAACTTAGCGATGAAGCC
GCGAAGTTGAAAAATGTTGTTGGTCACCACGAAGCAGCAACAAACATTGTGAAAGACTATCGCTACACTTACGATAAGTACTTT
TTACATATGCCTATTACGATTAACTTTAAGGCAAATAAGACAGGTTTTATCAACGACCGTATCCTGCAATATATTGCAAAAGAG
AAGGACCTGCATGTCATTGGGATTGATCGCGGTGAACGCAATCTGATTTACGTGAGTGTTATTGATACCTGCGGTAATATTGTT
GAGCAAAAGTCTTTTAATATCGTTAATGGTTACGACTACCAAATTAAGCTTAAACAACAGGAAGGTGCCCGCCAGATCGCCCGT
AAGGAGTGGAAGGAAATCGGAAAAATTAAGGAAATCAAAGAGGGATATCTGAGCTTGGTTATTCATGAAATCTCAAAGATGGTT
ATTAAGTACAACGCCATCATCGCTATGGAAGACTTATCGTATGGGTTTAAAAAGGGTCGTTTCAAAGTTGAGCGCCAGGTCTAC
CAAAAGTTTGAAACGATGCTTATTAATAAATTAAACTACTTGGTTTTCAAAGATATCTCTATTACCGAGAATGGAGGTTTACTG
AAAGGATACCAGTTAACGTATATCCCCGATAAGCTTAAAAACGTGGGCCATCAGTGTGGCTGTATTTTCTATGTGCCCGCGGCA
TATACATCAAAAATTGACCCGACGACGGGTTTCGTTAATATCTTCAAGTTCAAAGATCTGACAGTTGATGCAAAACGCGAATTC
ATTAAGAAGTTCGATAGTATTCGCTATGACTCCGAGAAAAATTTGTTTTGCTTCACTTTTGACTACAATAACTTTATTACTCAG
AATACAGTCATGAGTAAAAGCTCCTGGTCGGTTTACACGTACGGGGTACGCATCAAACGTCGTTTTGTGAATGGTCGTTTTAGT
AATGAGTCGGATACAATTGATATTACCAAGGATATGGAGAAGACTCTGGAAATGACAGACATCAATTGGCGTGATGGACATGAT
TTGCGTCAGGACATTATCGACTATGAGATTGTGCAGCATATTTTCGAAATTTTTCGCCTGACGGTGCAAATGCGTAATTCCTTA
AGCGAACTGGAAGATCGCGACTATGACCGCTTAATTTCTCCTGTGCTGAATGAGAACAACATCTTCTATGACTCAGCGAAAGCC
GGGGACGCTTTGCCAAAGGATGCAGATGCTAACGGTGCATATTGTATTGCTCTGAAAGGCCTTTACGAGATCAAACAAATTACT
GAAAACTGGAAGGAAGATGGAAAGTTTTCCCGTGATAAATTGAAGATCTCTAATAAGGACTGGTTTGACTTTATCCAAAATAAA
CGTTATTTA
ErCas12a-K754G-AA (SEQ ID NO: 140)
MNNGTNNFQNFIGISSLQKTLRNALIPTETTQQFIVKNGIIKEDELRGENRQILKDIMDDYYRGFISETLSSIDDIDWTSLFEK
MEIQLKNGDNKDTLIKEQTEYRKAIHKKFANDDRFKNMFSAKLISDILPEFVIHNNNYSASEKEEKTQVIKLESRFATSFKDYF
KNRANCFSADDISSSSCHRIVNDNAEIFFSNALVYRRIVKSLSNDDINKISGDMKDSLKEMSLEEIYSYEKYGEFITQEGISFY
NDICGKVNSFMNLYCQKNKENKNLYKLQKLHKQILCIADTSYEVPYKFESDEEVYQSVNGELDNISSKHIVERLRKIGDNYNGY
NLDKIYIVSKFYESVSQKTYRDWETINTALEIHYNNILPGNGKSKADKVKKAVKNDLQKSITEINELVSNYKLCSDDNIKAETY
IHEISHILNNFEAQELKYNPEIHLVESELKASELKNVLDVIMNAFHWCSVFMTEELVDKDNNFYAELEEIYDEIYPVISLYNLV
RNYVTQKPYSTKKIKLNFGIPTLADGWSKSKEYSNNAIILMRDNLYYLGIFNAKNKPDKKIIEGNTSENKGDYKKMIYNLLPGP
NKMIPKVFLSSKTGVETYKPSAYILEGYKQNKHIKSSKDFDITFCHDLIDYFKNCIAIHPEWKNFGFDFSDTSTYEDISGFYRE
VELQGYKIDWTYISEKDIDLLQEKGQLYLFQIYNKDFSKKSTGNDNLHTMYLKNLFSEENLKDIVLKLNGEAEIFFRKSSIGNP
IIHKKGSILVNRTYEAEEKDQFGNIQIVRKNIPENIYQELYKYFNDKSDKELSDEAAKLKNVVGHHEAATNIVKDYRYTYDKYF
LHMPITINFKANKTGFINDRILQYIAKEKDLHVIGIDRGERNLIYVSVIDTCGNIVEQKSFNIVNGYDYQIKLKQQEGARQIAR
KEWKEIGKIKEIKEGYLSLVIHEISKMVIKYNAIIAMEDLSYGFKKGRFKVERQVYQKFETMLINKLNYLVFKDISITENGGLL
KGYQLTYIPDKLKNVGHQCGCIFYVPAAYTSKIDPTTGFVNIFKFKDLTVDAKREFIKKFDSIRYDSEKNLFCFTFDYNNFITQ
NTVMSKSSWSVYTYGVRIKRRFVNGRFSNESDTIDITKDMEKTLEMTDINWRDGHDLRQDIIDYEIVQHIFEIFRLTVQMRNSL
SELEDRDYDRLISPVLNENNIFYDSAKAGDALPKDADANGAYCIALKGLYEIKQITENWKEDGKFSRDKLKISNKDWEDFIQNK
RYL
ErCas12a-I757W-NT (SEQ ID NO: 141)
atgAATAACGGTACCAATAACTTTCAAAATTTTATCGGGATCTCCTCGTTGCAAAAAACTCTTCGTAATGCTTTAATCCCGACT
GAGACAACACAGCAGTTCATCGTTAAAAACGGCATCATTAAAGAAGATGAGCTGCGCGGCGAGAACCGTCAGATTTTAAAGGAC
ATCATGGACGACTATTACCGTGGGTTCATCTCAGAAACATTAAGCAGCATCGATGATATCGACTGGACCTCACTGTTTGAGAAG
ATGGAGATTCAACTTAAGAATGGAGACAACAAAGACACTTTAATTAAGGAGCAGACGGAATATCGTAAAGCTATCCATAAAAAA
TTTGCAAACGATGACCGTTTCAAAAATATGTTTTCCGCAAAATTGATTAGCGACATTTTACCTGAATTCGTAATCCATAACAAC
AACTATTCCGCATCTGAAAAAGAGGAGAAGACCCAAGTTATCAAACTTTTTTCACGTTTCGCGACATCTTTTAAAGACTACTTT
AAGAATCGTGCGAATTGTTTCAGTGCAGATGATATTTCGTCTAGTTCATGTCACCGTATCGTGAATGACAACGCTGAGATTTTC
TTTTCTAATGCGTTGGTGTATCGCCGCATCGTAAAGTCCTTGTCGAATGATGATATCAACAAAATTAGTGGTGACATGAAAGAC
TCCCTGAAAGAAATGTCATTAGAGGAGATTTACAGCTACGAAAAATACGGAGAGTTCATCACTCAGGAAGGTATCTCCTTTTAC
AACGATATTTGCGGCAAAGTTAATAGTTTCATGAATCTGTATTGTCAGAAGAATAAGGAAAACAAGAATCTGTACAAGTTACAA
AAGCTTCATAAACAGATCTTGTGCATCGCCGACACGTCTTATGAAGTCCCGTATAAATTTGAAAGCGACGAAGAAGTATATCAG
AGTGTGAATGGATTCTTGGACAATATCTCATCAAAACACATTGTTGAACGTTTGCGCAAAATCGGCGACAACTATAACGGATAC
AACTTGGATAAAATTTATATCGTATCAAAATTTTATGAATCAGTATCCCAAAAGACTTACCGTGATTGGGAGACTATTAATACG
GCGTTAGAAATCCATTACAACAACATTCTGCCGGGTAACGGTAAATCGAAAGCGGACAAAGTGAAGAAGGCGGTTAAGAACGAT
CTTCAGAAGTCTATCACGGAGATTAATGAGCTGGTTTCCAATTACAAGTTGTGCTCGGATGATAACATCAAAGCTGAAACCTAT
ATCCATGAAATTTCTCATATTCTTAATAACTTCGAGGCACAAGAATTAAAATATAACCCAGAAATTCATCTGGTTGAGAGCGAA
CTTAAAGCTTCAGAATTAAAAAATGTTTTGGACGTAATTATGAACGCCTTCCATTGGTGCAGCGTGTTTATGACAGAGGAGTTA
GTAGATAAGGATAACAACTTTTATGCAGAATTGGAAGAGATCTATGATGAGATCTATCCAGTGATTTCACTGTATAACTTAGTC
CGTAATTACGTCACTCAGAAGCCGTACTCAACTAAAAAGATCAAGTTAAATTTTGGAATTCCGACATTGGCGGATGGTTGGAGT
AAGTCTAAGGAATACTCAAATAACGCTATTATCTTAATGCGTGACAACCTGTATTACTTGGGTATTTTCAATGCCAAAAATAAG
CCCGATAAAAAAATCATTGAAGGGAATACTTCAGAAAATAAGGGAGATTACAAAAAAATGATTTATAACCTTTTGCCAGGCCCA
AACAAAATGATCCCCAAGGTGTTTTTGAGTAGTAAGACGGGAGTAGAAACATATAAGCCATCAGCGTACATTCTTGAAGGGTAC
AAACAAAATAAACACATCAAGAGCAGCAAGGACTTTGACATTACATTTTGTCATGACTTAATCGACTACTTTAAAAATTGCATT
GCCATTCACCCTGAGTGGAAAAATTTTGGTTTCGACTTCAGTGATACCTCTACCTATGAAGATATCTCTGGTTTTTATCGTGAG
GTAGAACTTCAGGGTTACAAGATCGATTGGACGTACATTTCCGAGAAAGACATTGATCTTTTACAAGAGAAGGGTCAGCTTTAC
TTATTTCAGATCTACAATAAAGACTTTTCGAAAAAATCCACGGGCAACGACAACCTTCATACAATGTACTTAAAGAACCTGTTC
TCTGAAGAAAACTTGAAAGATATCGTGCTTAAATTGAATGGCGAGGCCGAGATTTTTTTCCGTAAAAGCTCGATTAAGAATCCC
TGGATCCACAAGAAAGGCAGCATTCTGGTAAATCGTACCTATGAAGCGGAGGAAAAGGACCAATTTGGTAATATTCAGATTGTC
CGTAAGAACATCCCTGAAAATATCTATCAAGAATTATATAAATATTTCAACGATAAGTCGGACAAGGAACTTAGCGATGAAGCC
GCGAAGTTGAAAAATGTTGTTGGTCACCACGAAGCAGCAACAAACATTGTGAAAGACTATCGCTACACTTACGATAAGTACTTT
TTACATATGCCTATTACGATTAACTTTAAGGCAAATAAGACAGGTTTTATCAACGACCGTATCCTGCAATATATTGCAAAAGAG
AAGGACCTGCATGTCATTGGGATTGATCGCGGTGAACGCAATCTGATTTACGTGAGTGTTATTGATACCTGCGGTAATATTGTT
GAGCAAAAGTCTTTTAATATCGTTAATGGTTACGACTACCAAATTAAGCTTAAACAACAGGAAGGTGCCCGCCAGATCGCCCGT
AAGGAGTGGAAGGAAATCGGAAAAATTAAGGAAATCAAAGAGGGATATCTGAGCTTGGTTATTCATGAAATCTCAAAGATGGTT
ATTAAGTACAACGCCATCATCGCTATGGAAGACTTATCGTATGGGTTTAAAAAGGGTCGTTTCAAAGTTGAGCGCCAGGTCTAC
CAAAAGTTTGAAACGATGCTTATTAATAAATTAAACTACTTGGTTTTCAAAGATATCTCTATTACCGAGAATGGAGGTTTACTG
AAAGGATACCAGTTAACGTATATCCCCGATAAGCTTAAAAACGTGGGCCATCAGTGTGGCTGTATTTTCTATGTGCCCGCGGCA
TATACATCAAAAATTGACCCGACGACGGGTTTCGTTAATATCTTCAAGTTCAAAGATCTGACAGTTGATGCAAAACGCGAATTC
ATTAAGAAGTTCGATAGTATTCGCTATGACTCCGAGAAAAATTTGTTTTGCTTCACTTTTGACTACAATAACTTTATTACTCAG
AATACAGTCATGAGTAAAAGCTCCTGGTCGGTTTACACGTACGGGGTACGCATCAAACGTCGTTTTGTGAATGGTCGTTTTAGT
AATGAGTCGGATACAATTGATATTACCAAGGATATGGAGAAGACTCTGGAAATGACAGACATCAATTGGCGTGATGGACATGAT
TTGCGTCAGGACATTATCGACTATGAGATTGTGCAGCATATTTTCGAAATTTTTCGCCTGACGGTGCAAATGCGTAATTCCTTA
AGCGAACTGGAAGATCGCGACTATGACCGCTTAATTTCTCCTGTGCTGAATGAGAACAACATCTTCTATGACTCAGCGAAAGCC
GGGGACGCTTTGCCAAAGGATGCAGATGCTAACGGTGCATATTGTATTGCTCTGAAAGGCCTTTACGAGATCAAACAAATTACT
GAAAACTGGAAGGAAGATGGAAAGTTTTCCCGTGATAAATTGAAGATCTCTAATAAGGACTGGTTTGACTTTATCCAAAATAAA
CGTTATTTA
ErCas12a-I757W-AA (SEQ ID NO: 142)
MNNGTNNFQNFIGISSLQKTLRNALIPTETTQQFIVKNGIIKEDELRGENRQILKDIMDDYYRGFISETLSSIDDIDWTSLFEK
MEIQLKNGDNKDTLIKEQTEYRKAIHKKFANDDRFKNMFSAKLISDILPEFVIHNNNYSASEKEEKTQVIKLFSRFATSFKDYF
KNRANCFSADDISSSSCHRIVNDNAEIFFSNALVYRRIVKSLSNDDINKISGDMKDSLKEMSLEEIYSYEKYGEFITQEGISFY
NDICGKVNSFMNLYCQKNKENKNLYKLQKLHKQILCIADTSYEVPYKFESDEEVYQSVNGELDNISSKHIVERLRKIGDNYNGY
NLDKIYIVSKFYESVSQKTYRDWETINTALEIHYNNILPGNGKSKADKVKKAVKNDLQKSITEINELVSNYKLCSDDNIKAETY
IHEISHILNNFEAQELKYNPEIHLVESELKASELKNVLDVIMNAFHWCSVFMTEELVDKDNNFYAELEEIYDEIYPVISLYNLV
RNYVTQKPYSTKKIKLNFGIPTLADGWSKSKEYSNNAIILMRDNLYYLGIFNAKNKPDKKIIEGNTSENKGDYKKMIYNLLPGP
NKMIPKVFLSSKTGVETYKPSAYILEGYKQNKHIKSSKDFDITFCHDLIDYFKNCIAIHPEWKNFGFDFSDTSTYEDISGFYRE
VELQGYKIDWTYISEKDIDLLQEKGQLYLFQIYNKDFSKKSTGNDNLHTMYLKNLFSEENLKDIVLKLNGEAEIFFRKSSIKNP
WIHKKGSILVNRTYEAEEKDQFGNIQIVRKNIPENIYQELYKYFNDKSDKELSDEAAKLKNVVGHHEAATNIVKDYRYTYDKYF
LHMPITINFKANKTGFINDRILQYIAKEKDLHVIGIDRGERNLIYVSVIDTCGNIVEQKSFNIVNGYDYQIKLKQQEGARQIAR
KEWKEIGKIKEIKEGYLSLVIHEISKMVIKYNAIIAMEDLSYGFKKGRFKVERQVYQKFETMLINKLNYLVFKDISITENGGLL
KGYQLTYIPDKLKNVGHQCGCIFYVPAAYTSKIDPTTGFVNIFKFKDLTVDAKREFIKKFDSIRYDSEKNLFCFTFDYNNFITQ
NTVMSKSSWSVYTYGVRIKRRFVNGRFSNESDTIDITKDMEKTLEMTDINWRDGHDLRQDIIDYEIVQHIFEIFRLTVQMRNSL
SELEDRDYDRLISPVLNENNIFYDSAKAGDALPKDADANGAYCIALKGLYEIKQITENWKEDGKFSRDKLKISNKDWFDFIQNK
RYL
ErCas12a-I757K-NT (SEQ ID NO: 143)
atgAATAACGGTACCAATAACTTTCAAAATTTTATCGGGATCTCCTCGTTGCAAAAAACTCTTCGTAATGCTTTAATCCCGACT
GAGACAACACAGCAGTTCATCGTTAAAAACGGCATCATTAAAGAAGATGAGCTGCGCGGCGAGAACCGTCAGATTTTAAAGGAC
ATCATGGACGACTATTACCGTGGGTTCATCTCAGAAACATTAAGCAGCATCGATGATATCGACTGGACCTCACTGTTTGAGAAG
ATGGAGATTCAACTTAAGAATGGAGACAACAAAGACACTTTAATTAAGGAGCAGACGGAATATCGTAAAGCTATCCATAAAAAA
TTTGCAAACGATGACCGTTTCAAAAATATGTTTTCCGCAAAATTGATTAGCGACATTTTACCTGAATTCGTAATCCATAACAAC
AACTATTCCGCATCTGAAAAAGAGGAGAAGACCCAAGTTATCAAACTTTTTTCACGTTTCGCGACATCTTTTAAAGACTACTTT
AAGAATCGTGCGAATTGTTTCAGTGCAGATGATATTTCGTCTAGTTCATGTCACCGTATCGTGAATGACAACGCTGAGATTTTC
TTTTCTAATGCGTTGGTGTATCGCCGCATCGTAAAGTCCTTGTCGAATGATGATATCAACAAAATTAGTGGTGACATGAAAGAC
TCCCTGAAAGAAATGTCATTAGAGGAGATTTACAGCTACGAAAAATACGGAGAGTTCATCACTCAGGAAGGTATCTCCTTTTAC
AACGATATTTGCGGCAAAGTTAATAGTTTCATGAATCTGTATTGTCAGAAGAATAAGGAAAACAAGAATCTGTACAAGTTACAA
AAGCTTCATAAACAGATCTTGTGCATCGCCGACACGTCTTATGAAGTCCCGTATAAATTTGAAAGCGACGAAGAAGTATATCAG
AGTGTGAATGGATTCTTGGACAATATCTCATCAAAACACATTGTTGAACGTTTGCGCAAAATCGGCGACAACTATAACGGATAC
AACTTGGATAAAATTTATATCGTATCAAAATTTTATGAATCAGTATCCCAAAAGACTTACCGTGATTGGGAGACTATTAATACG
GCGTTAGAAATCCATTACAACAACATTCTGCCGGGTAACGGTAAATCGAAAGCGGACAAAGTGAAGAAGGCGGTTAAGAACGAT
CTTCAGAAGTCTATCACGGAGATTAATGAGCTGGTTTCCAATTACAAGTTGTGCTCGGATGATAACATCAAAGCTGAAACCTAT
ATCCATGAAATTTCTCATATTCTTAATAACTTCGAGGCACAAGAATTAAAATATAACCCAGAAATTCATCTGGTTGAGAGCGAA
CTTAAAGCTTCAGAATTAAAAAATGTTTTGGACGTAATTATGAACGCCTTCCATTGGTGCAGCGTGTTTATGACAGAGGAGTTA
GTAGATAAGGATAACAACTTTTATGCAGAATTGGAAGAGATCTATGATGAGATCTATCCAGTGATTTCACTGTATAACTTAGTC
CGTAATTACGTCACTCAGAAGCCGTACTCAACTAAAAAGATCAAGTTAAATTTTGGAATTCCGACATTGGCGGATGGTTGGAGT
AAGTCTAAGGAATACTCAAATAACGCTATTATCTTAATGCGTGACAACCTGTATTACTTGGGTATTTTCAATGCCAAAAATAAG
CCCGATAAAAAAATCATTGAAGGGAATACTTCAGAAAATAAGGGAGATTACAAAAAAATGATTTATAACCTTTTGCCAGGCCCA
AACAAAATGATCCCCAAGGTGTTTTTGAGTAGTAAGACGGGAGTAGAAACATATAAGCCATCAGCGTACATTCTTGAAGGGTAC
AAACAAAATAAACACATCAAGAGCAGCAAGGACTTTGACATTACATTTTGTCATGACTTAATCGACTACTTTAAAAATTGCATT
GCCATTCACCCTGAGTGGAAAAATTTTGGTTTCGACTTCAGTGATACCTCTACCTATGAAGATATCTCTGGTTTTTATCGTGAG
GTAGAACTTCAGGGTTACAAGATCGATTGGACGTACATTTCCGAGAAAGACATTGATCTTTTACAAGAGAAGGGTCAGCTTTAC
TTATTTCAGATCTACAATAAAGACTTTTCGAAAAAATCCACGGGCAACGACAACCTTCATACAATGTACTTAAAGAACCTGTTC
TCTGAAGAAAACTTGAAAGATATCGTGCTTAAATTGAATGGCGAGGCCGAGATTTTTTTCCGTAAAAGCTCGATTAAGAATCCC
AAAATCCACAAGAAAGGCAGCATTCTGGTAAATCGTACCTATGAAGCGGAGGAAAAGGACCAATTTGGTAATATTCAGATTGTC
CGTAAGAACATCCCTGAAAATATCTATCAAGAATTATATAAATATTTCAACGATAAGTCGGACAAGGAACTTAGCGATGAAGCC
GCGAAGTTGAAAAATGTTGTTGGTCACCACGAAGCAGCAACAAACATTGTGAAAGACTATCGCTACACTTACGATAAGTACTTT
TTACATATGCCTATTACGATTAACTTTAAGGCAAATAAGACAGGTTTTATCAACGACCGTATCCTGCAATATATTGCAAAAGAG
AAGGACCTGCATGTCATTGGGATTGATCGCGGTGAACGCAATCTGATTTACGTGAGTGTTATTGATACCTGCGGTAATATTGTT
GAGCAAAAGTCTTTTAATATCGTTAATGGTTACGACTACCAAATTAAGCTTAAACAACAGGAAGGTGCCCGCCAGATCGCCCGT
AAGGAGTGGAAGGAAATCGGAAAAATTAAGGAAATCAAAGAGGGATATCTGAGCTTGGTTATTCATGAAATCTCAAAGATGGTT
ATTAAGTACAACGCCATCATCGCTATGGAAGACTTATCGTATGGGTTTAAAAAGGGTCGTTTCAAAGTTGAGCGCCAGGTCTAC
CAAAAGTTTGAAACGATGCTTATTAATAAATTAAACTACTTGGTTTTCAAAGATATCTCTATTACCGAGAATGGAGGTTTACTG
AAAGGATACCAGTTAACGTATATCCCCGATAAGCTTAAAAACGTGGGCCATCAGTGTGGCTGTATTTTCTATGTGCCCGCGGCA
TATACATCAAAAATTGACCCGACGACGGGTTTCGTTAATATCTTCAAGTTCAAAGATCTGACAGTTGATGCAAAACGCGAATTC
ATTAAGAAGTTCGATAGTATTCGCTATGACTCCGAGAAAAATTTGTTTTGCTTCACTTTTGACTACAATAACTTTATTACTCAG
AATACAGTCATGAGTAAAAGCTCCTGGTCGGTTTACACGTACGGGGTACGCATCAAACGTCGTTTTGTGAATGGTCGTTTTAGT
AATGAGTCGGATACAATTGATATTACCAAGGATATGGAGAAGACTCTGGAAATGACAGACATCAATTGGCGTGATGGACATGAT
TTGCGTCAGGACATTATCGACTATGAGATTGTGCAGCATATTTTCGAAATTTTTCGCCTGACGGTGCAAATGCGTAATTCCTTA
AGCGAACTGGAAGATCGCGACTATGACCGCTTAATTTCTCCTGTGCTGAATGAGAACAACATCTTCTATGACTCAGCGAAAGCC
GGGGACGCTTTGCCAAAGGATGCAGATGCTAACGGTGCATATTGTATTGCTCTGAAAGGCCTTTACGAGATCAAACAAATTACT
GAAAACTGGAAGGAAGATGGAAAGTTTTCCCGTGATAAATTGAAGATCTCTAATAAGGACTGGTTTGACTTTATCCAAAATAAA
CGTTATTTA
ErCas12a-I757K-AA (SEQ ID NO: 144)
MNNGTNNFQNFIGISSLQKTLRNALIPTETTQQFIVKNGIIKEDELRGENRQILKDIMDDYYRGFISETLSSIDDIDWTSLFEK
MEIQLKNGDNKDTLIKEQTEYRKAIHKKFANDDRFKNMFSAKLISDILPEFVIHNNNYSASEKEEKTQVIKLFSRFATSFKDYF
KNRANCESADDISSSSCHRIVNDNAEIFFSNALVYRRIVKSLSNDDINKISGDMKDSLKEMSLEEIYSYEKYGEFITQEGISFY
NDICGKVNSFMNLYCQKNKENKNLYKLQKLHKQILCIADTSYEVPYKFESDEEVYQSVNGELDNISSKHIVERLRKIGDNYNGY
NLDKIYIVSKFYESVSQKTYRDWETINTALEIHYNNILPGNGKSKADKVKKAVKNDLQKSITEINELVSNYKLCSDDNIKAETY
IHEISHILNNFEAQELKYNPEIHLVESELKASELKNVLDVIMNAFHWCSVFMTEELVDKDNNFYAELEEIYDEIYPVISLYNLV
RNYVTQKPYSTKKIKLNFGIPTLADGWSKSKEYSNNAIILMRDNLYYLGIFNAKNKPDKKIIEGNTSENKGDYKKMIYNLLPGP
NKMIPKVFLSSKTGVETYKPSAYILEGYKQNKHIKSSKDFDITFCHDLIDYFKNCIAIHPEWKNFGFDFSDTSTYEDISGFYRE
VELQGYKIDWTYISEKDIDLLQEKGQLYLFQIYNKDFSKKSTGNDNLHTMYLKNLFSEENLKDIVLKLNGEAEIFFRKSSIKNP
KIHKKGSILVNRTYEAEEKDQFGNIQIVRKNIPENIYQELYKYFNDKSDKELSDEAAKLKNVVGHHEAATNIVKDYRYTYDKYF
LHMPITINFKANKTGFINDRILQYIAKEKDLHVIGIDRGERNLIYVSVIDTCGNIVEQKSFNIVNGYDYQIKLKQQEGARQIAR
KEWKEIGKIKEIKEGYLSLVIHEISKMVIKYNAIIAMEDLSYGFKKGRFKVERQVYQKFETMLINKLNYLVFKDISITENGGLL
KGYQLTYIPDKLKNVGHQCGCIFYVPAAYTSKIDPTTGFVNIFKFKDLTVDAKREFIKKFDSIRYDSEKNLFCFTFDYNNFITQ
NTVMSKSSWSVYTYGVRIKRRFVNGRFSNESDTIDITKDMEKTLEMTDINWRDGHDLRQDIIDYEIVQHIFEIFRLTVQMRNSL
SELEDRDYDRLISPVLNENNIFYDSAKAGDALPKDADANGAYCIALKGLYEIKQITENWKEDGKFSRDKLKISNKDWEDFIQNK
RYL
ErCas12a-E771R-NT (SEQ ID NO: 145)
atgAATAACGGTACCAATAACTTTCAAAATTTTATCGGGATCTCCTCGTTGCAAAAAACTCTTCGTAATGCTTTAATCCCGACT
GAGACAACACAGCAGTTCATCGTTAAAAACGGCATCATTAAAGAAGATGAGCTGCGCGGCGAGAACCGTCAGATTTTAAAGGAC
ATCATGGACGACTATTACCGTGGGTTCATCTCAGAAACATTAAGCAGCATCGATGATATCGACTGGACCTCACTGTTTGAGAAG
ATGGAGATTCAACTTAAGAATGGAGACAACAAAGACACTTTAATTAAGGAGCAGACGGAATATCGTAAAGCTATCCATAAAAAA
TTTGCAAACGATGACCGTTTCAAAAATATGTTTTCCGCAAAATTGATTAGCGACATTTTACCTGAATTCGTAATCCATAACAAC
AACTATTCCGCATCTGAAAAAGAGGAGAAGACCCAAGTTATCAAACTTTTTTCACGTTTCGCGACATCTTTTAAAGACTACTTT
AAGAATCGTGCGAATTGTTTCAGTGCAGATGATATTTCGTCTAGTTCATGTCACCGTATCGTGAATGACAACGCTGAGATTTTC
TTTTCTAATGCGTTGGTGTATCGCCGCATCGTAAAGTCCTTGTCGAATGATGATATCAACAAAATTAGTGGTGACATGAAAGAC
TCCCTGAAAGAAATGTCATTAGAGGAGATTTACAGCTACGAAAAATACGGAGAGTTCATCACTCAGGAAGGTATCTCCTTTTAC
AACGATATTTGCGGCAAAGTTAATAGTTTCATGAATCTGTATTGTCAGAAGAATAAGGAAAACAAGAATCTGTACAAGTTACAA
AAGCTTCATAAACAGATCTTGTGCATCGCCGACACGTCTTATGAAGTCCCGTATAAATTTGAAAGCGACGAAGAAGTATATCAG
AGTGTGAATGGATTCTTGGACAATATCTCATCAAAACACATTGTTGAACGTTTGCGCAAAATCGGCGACAACTATAACGGATAC
AACTTGGATAAAATTTATATCGTATCAAAATTTTATGAATCAGTATCCCAAAAGACTTACCGTGATTGGGAGACTATTAATACG
GCGTTAGAAATCCATTACAACAACATTCTGCCGGGTAACGGTAAATCGAAAGCGGACAAAGTGAAGAAGGCGGTTAAGAACGAT
CTTCAGAAGTCTATCACGGAGATTAATGAGCTGGTTTCCAATTACAAGTTGTGCTCGGATGATAACATCAAAGCTGAAACCTAT
ATCCATGAAATTTCTCATATTCTTAATAACTTCGAGGCACAAGAATTAAAATATAACCCAGAAATTCATCTGGTTGAGAGCGAA
CTTAAAGCTTCAGAATTAAAAAATGTTTTGGACGTAATTATGAACGCCTTCCATTGGTGCAGCGTGTTTATGACAGAGGAGTTA
GTAGATAAGGATAACAACTTTTATGCAGAATTGGAAGAGATCTATGATGAGATCTATCCAGTGATTTCACTGTATAACTTAGTC
CGTAATTACGTCACTCAGAAGCCGTACTCAACTAAAAAGATCAAGTTAAATTTTGGAATTCCGACATTGGCGGATGGTTGGAGT
AAGTCTAAGGAATACTCAAATAACGCTATTATCTTAATGCGTGACAACCTGTATTACTTGGGTATTTTCAATGCCAAAAATAAG
CCCGATAAAAAAATCATTGAAGGGAATACTTCAGAAAATAAGGGAGATTACAAAAAAATGATTTATAACCTTTTGCCAGGCCCA
AACAAAATGATCCCCAAGGTGTTTTTGAGTAGTAAGACGGGAGTAGAAACATATAAGCCATCAGCGTACATTCTTGAAGGGTAC
AAACAAAATAAACACATCAAGAGCAGCAAGGACTTTGACATTACATTTTGTCATGACTTAATCGACTACTTTAAAAATTGCATT
GCCATTCACCCTGAGTGGAAAAATTTTGGTTTCGACTTCAGTGATACCTCTACCTATGAAGATATCTCTGGTTTTTATCGTGAG
GTAGAACTTCAGGGTTACAAGATCGATTGGACGTACATTTCCGAGAAAGACATTGATCTTTTACAAGAGAAGGGTCAGCTTTAC
TTATTTCAGATCTACAATAAAGACTTTTCGAAAAAATCCACGGGCAACGACAACCTTCATACAATGTACTTAAAGAACCTGTTC
TCTGAAGAAAACTTGAAAGATATCGTGCTTAAATTGAATGGCGAGGCCGAGATTTTTTTCCGTAAAAGCTCGATTAAGAATCCC
ATCATCCACAAGAAAGGCAGCATTCTGGTAAATCGTACCTATCGTGCGGAGGAAAAGGACCAATTTGGTAATATTCAGATTGTC
CGTAAGAACATCCCTGAAAATATCTATCAAGAATTATATAAATATTTCAACGATAAGTCGGACAAGGAACTTAGCGATGAAGCC
GCGAAGTTGAAAAATGTTGTTGGTCACCACGAAGCAGCAACAAACATTGTGAAAGACTATCGCTACACTTACGATAAGTACTTT
TTACATATGCCTATTACGATTAACTTTAAGGCAAATAAGACAGGTTTTATCAACGACCGTATCCTGCAATATATTGCAAAAGAG
AAGGACCTGCATGTCATTGGGATTGATCGCGGTGAACGCAATCTGATTTACGTGAGTGTTATTGATACCTGCGGTAATATTGTT
GAGCAAAAGTCTTTTAATATCGTTAATGGTTACGACTACCAAATTAAGCTTAAACAACAGGAAGGTGCCCGCCAGATCGCCCGT
AAGGAGTGGAAGGAAATCGGAAAAATTAAGGAAATCAAAGAGGGATATCTGAGCTTGGTTATTCATGAAATCTCAAAGATGGTT
ATTAAGTACAACGCCATCATCGCTATGGAAGACTTATCGTATGGGTTTAAAAAGGGTCGTTTCAAAGTTGAGCGCCAGGTCTAC
CAAAAGTTTGAAACGATGCTTATTAATAAATTAAACTACTTGGTTTTCAAAGATATCTCTATTACCGAGAATGGAGGTTTACTG
AAAGGATACCAGTTAACGTATATCCCCGATAAGCTTAAAAACGTGGGCCATCAGTGTGGCTGTATTTTCTATGTGCCCGCGGCA
TATACATCAAAAATTGACCCGACGACGGGTTTCGTTAATATCTTCAAGTTCAAAGATCTGACAGTTGATGCAAAACGCGAATTC
ATTAAGAAGTTCGATAGTATTCGCTATGACTCCGAGAAAAATTTGTTTTGCTTCACTTTTGACTACAATAACTTTATTACTCAG
AATACAGTCATGAGTAAAAGCTCCTGGTCGGTTTACACGTACGGGGTACGCATCAAACGTCGTTTTGTGAATGGTCGTTTTAGT
AATGAGTCGGATACAATTGATATTACCAAGGATATGGAGAAGACTCTGGAAATGACAGACATCAATTGGCGTGATGGACATGAT
TTGCGTCAGGACATTATCGACTATGAGATTGTGCAGCATATTTTCGAAATTTTTCGCCTGACGGTGCAAATGCGTAATTCCTTA
AGCGAACTGGAAGATCGCGACTATGACCGCTTAATTTCTCCTGTGCTGAATGAGAACAACATCTTCTATGACTCAGCGAAAGCC
GGGGACGCTTTGCCAAAGGATGCAGATGCTAACGGTGCATATTGTATTGCTCTGAAAGGCCTTTACGAGATCAAACAAATTACT
GAAAACTGGAAGGAAGATGGAAAGTTTTCCCGTGATAAATTGAAGATCTCTAATAAGGACTGGTTTGACTTTATCCAAAATAAA
CGTTATTTA
ErCas12a-E771R-AA (SEQ ID NO: 146)
MNNGTNNFQNFIGISSLQKTLRNALIPTETTQQFIVKNGIIKEDELRGENRQILKDIMDDYYRGFISETLSSIDDIDWTSLFEK
MEIQLKNGDNKDTLIKEQTEYRKAIHKKFANDDRFKNMFSAKLISDILPEFVIHNNNYSASEKEEKTQVIKLFSRFATSFKDYF
KNRANCFSADDISSSSCHRIVNDNAEIFFSNALVYRRIVKSLSNDDINKISGDMKDSLKEMSLEEIYSYEKYGEFITQEGISFY
NDICGKVNSFMNLYCQKNKENKNLYKLQKLHKQILCIADTSYEVPYKFESDEEVYQSVNGELDNISSKHIVERLRKIGDNYNGY
NLDKIYIVSKFYESVSQKTYRDWETINTALEIHYNNILPGNGKSKADKVKKAVKNDLQKSITEINELVSNYKLCSDDNIKAETY
IHEISHILNNFEAQELKYNPEIHLVESELKASELKNVLDVIMNAFHWCSVFMTEELVDKDNNFYAELEEIYDEIYPVISLYNLV
RNYVTQKPYSTKKIKLNFGIPTLADGWSKSKEYSNNAIILMRDNLYYLGIFNAKNKPDKKIIEGNTSENKGDYKKMIYNLLPGP
NKMIPKVFLSSKTGVETYKPSAYILEGYKQNKHIKSSKDFDITFCHDLIDYFKNCIAIHPEWKNFGFDFSDTSTYEDISGFYRE
VELQGYKIDWTYISEKDIDLLQEKGQLYLFQIYNKDFSKKSTGNDNLHTMYLKNLFSEENLKDIVLKLNGEAEIFFRKSSIKNP
IIHKKGSILVNRTYRAEEKDQFGNIQIVRKNIPENIYQELYKYFNDKSDKELSDEAAKLKNVVGHHEAATNIVKDYRYTYDKYF
LHMPITINFKANKTGFINDRILQYIAKEKDLHVIGIDRGERNLIYVSVIDTCGNIVEQKSFNIVNGYDYQIKLKQQEGARQIAR
KEWKEIGKIKEIKEGYLSLVIHEISKMVIKYNAIIAMEDLSYGFKKGRFKVERQVYQKFETMLINKLNYLVFKDISITENGGLL
KGYQLTYIPDKLKNVGHQCGCIFYVPAAYTSKIDPTTGFVNIFKFKDLTVDAKREFIKKFDSIRYDSEKNLFCFTFDYNNFITQ
NTVMSKSSWSVYTYGVRIKRRFVNGRFSNESDTIDITKDMEKTLEMTDINWRDGHDLRQDIIDYEIVQHIFEIFRLTVQMRNSL
SELEDRDYDRLISPVLNENNIFYDSAKAGDALPKDADANGAYCIALKGLYEIKQITENWKEDGKFSRDKLKISNKDWFDFIQNK
RYL
ErCas12a-N787A-NT (SEQ ID NO: 147)
atgAATAACGGTACCAATAACTTTCAAAATTTTATCGGGATCTCCTCGTTGCAAAAAACTCTTCGTAATGCTTTAATCCCGACT
GAGACAACACAGCAGTTCATCGTTAAAAACGGCATCATTAAAGAAGATGAGCTGCGCGGCGAGAACCGTCAGATTTTAAAGGAC
ATCATGGACGACTATTACCGTGGGTTCATCTCAGAAACATTAAGCAGCATCGATGATATCGACTGGACCTCACTGTTTGAGAAG
ATGGAGATTCAACTTAAGAATGGAGACAACAAAGACACTTTAATTAAGGAGCAGACGGAATATCGTAAAGCTATCCATAAAAAA
TTTGCAAACGATGACCGTTTCAAAAATATGTTTTCCGCAAAATTGATTAGCGACATTTTACCTGAATTCGTAATCCATAACAAC
AACTATTCCGCATCTGAAAAAGAGGAGAAGACCCAAGTTATCAAACTTTTTTCACGTTTCGCGACATCTTTTAAAGACTACTTT
AAGAATCGTGCGAATTGTTTCAGTGCAGATGATATTTCGTCTAGTTCATGTCACCGTATCGTGAATGACAACGCTGAGATTTTC
TTTTCTAATGCGTTGGTGTATCGCCGCATCGTAAAGTCCTTGTCGAATGATGATATCAACAAAATTAGTGGTGACATGAAAGAC
TCCCTGAAAGAAATGTCATTAGAGGAGATTTACAGCTACGAAAAATACGGAGAGTTCATCACTCAGGAAGGTATCTCCTTTTAC
AACGATATTTGCGGCAAAGTTAATAGTTTCATGAATCTGTATTGTCAGAAGAATAAGGAAAACAAGAATCTGTACAAGTTACAA
AAGCTTCATAAACAGATCTTGTGCATCGCCGACACGTCTTATGAAGTCCCGTATAAATTTGAAAGCGACGAAGAAGTATATCAG
AGTGTGAATGGATTCTTGGACAATATCTCATCAAAACACATTGTTGAACGTTTGCGCAAAATCGGCGACAACTATAACGGATAC
AACTTGGATAAAATTTATATCGTATCAAAATTTTATGAATCAGTATCCCAAAAGACTTACCGTGATTGGGAGACTATTAATACG
GCGTTAGAAATCCATTACAACAACATTCTGCCGGGTAACGGTAAATCGAAAGCGGACAAAGTGAAGAAGGCGGTTAAGAACGAT
CTTCAGAAGTCTATCACGGAGATTAATGAGCTGGTTTCCAATTACAAGTTGTGCTCGGATGATAACATCAAAGCTGAAACCTAT
ATCCATGAAATTTCTCATATTCTTAATAACTTCGAGGCACAAGAATTAAAATATAACCCAGAAATTCATCTGGTTGAGAGCGAA
CTTAAAGCTTCAGAATTAAAAAATGTTTTGGACGTAATTATGAACGCCTTCCATTGGTGCAGCGTGTTTATGACAGAGGAGTTA
GTAGATAAGGATAACAACTTTTATGCAGAATTGGAAGAGATCTATGATGAGATCTATCCAGTGATTTCACTGTATAACTTAGTC
CGTAATTACGTCACTCAGAAGCCGTACTCAACTAAAAAGATCAAGTTAAATTTTGGAATTCCGACATTGGCGGATGGTTGGAGT
AAGTCTAAGGAATACTCAAATAACGCTATTATCTTAATGCGTGACAACCTGTATTACTTGGGTATTTTCAATGCCAAAAATAAG
CCCGATAAAAAAATCATTGAAGGGAATACTTCAGAAAATAAGGGAGATTACAAAAAAATGATTTATAACCTTTTGCCAGGCCCA
AACAAAATGATCCCCAAGGTGTTTTTGAGTAGTAAGACGGGAGTAGAAACATATAAGCCATCAGCGTACATTCTTGAAGGGTAC
AAACAAAATAAACACATCAAGAGCAGCAAGGACTTTGACATTACATTTTGTCATGACTTAATCGACTACTTTAAAAATTGCATT
GCCATTCACCCTGAGTGGAAAAATTTTGGTTTCGACTTCAGTGATACCTCTACCTATGAAGATATCTCTGGTTTTTATCGTGAG
GTAGAACTTCAGGGTTACAAGATCGATTGGACGTACATTTCCGAGAAAGACATTGATCTTTTACAAGAGAAGGGTCAGCTTTAC
TTATTTCAGATCTACAATAAAGACTTTTCGAAAAAATCCACGGGCAACGACAACCTTCATACAATGTACTTAAAGAACCTGTTC
TCTGAAGAAAACTTGAAAGATATCGTGCTTAAATTGAATGGCGAGGCCGAGATTTTTTTCCGTAAAAGCTCGATTAAGAATCCC
ATCATCCACAAGAAAGGCAGCATTCTGGTAAATCGTACCTATGAAGCGGAGGAAAAGGACCAATTTGGTAATATTCAGATTGTC
CGTAAGGCGATCCCTGAAAATATCTATCAAGAATTATATAAATATTTCAACGATAAGTCGGACAAGGAACTTAGCGATGAAGCC
GCGAAGTTGAAAAATGTTGTTGGTCACCACGAAGCAGCAACAAACATTGTGAAAGACTATCGCTACACTTACGATAAGTACTTT
TTACATATGCCTATTACGATTAACTTTAAGGCAAATAAGACAGGTTTTATCAACGACCGTATCCTGCAATATATTGCAAAAGAG
AAGGACCTGCATGTCATTGGGATTGATCGCGGTGAACGCAATCTGATTTACGTGAGTGTTATTGATACCTGCGGTAATATTGTT
GAGCAAAAGTCTTTTAATATCGTTAATGGTTACGACTACCAAATTAAGCTTAAACAACAGGAAGGTGCCCGCCAGATCGCCCGT
AAGGAGTGGAAGGAAATCGGAAAAATTAAGGAAATCAAAGAGGGATATCTGAGCTTGGTTATTCATGAAATCTCAAAGATGGTT
ATTAAGTACAACGCCATCATCGCTATGGAAGACTTATCGTATGGGTTTAAAAAGGGTCGTTTCAAAGTTGAGCGCCAGGTCTAC
CAAAAGTTTGAAACGATGCTTATTAATAAATTAAACTACTTGGTTTTCAAAGATATCTCTATTACCGAGAATGGAGGTTTACTG
AAAGGATACCAGTTAACGTATATCCCCGATAAGCTTAAAAACGTGGGCCATCAGTGTGGCTGTATTTTCTATGTGCCCGCGGCA
TATACATCAAAAATTGACCCGACGACGGGTTTCGTTAATATCTTCAAGTTCAAAGATCTGACAGTTGATGCAAAACGCGAATTC
ATTAAGAAGTTCGATAGTATTCGCTATGACTCCGAGAAAAATTTGTTTTGCTTCACTTTTGACTACAATAACTTTATTACTCAG
AATACAGTCATGAGTAAAAGCTCCTGGTCGGTTTACACGTACGGGGTACGCATCAAACGTCGTTTTGTGAATGGTCGTTTTAGT
AATGAGTCGGATACAATTGATATTACCAAGGATATGGAGAAGACTCTGGAAATGACAGACATCAATTGGCGTGATGGACATGAT
TTGCGTCAGGACATTATCGACTATGAGATTGTGCAGCATATTTTCGAAATTTTTCGCCTGACGGTGCAAATGCGTAATTCCTTA
AGCGAACTGGAAGATCGCGACTATGACCGCTTAATTTCTCCTGTGCTGAATGAGAACAACATCTTCTATGACTCAGCGAAAGCC
GGGGACGCTTTGCCAAAGGATGCAGATGCTAACGGTGCATATTGTATTGCTCTGAAAGGCCTTTACGAGATCAAACAAATTACT
GAAAACTGGAAGGAAGATGGAAAGTTTTCCCGTGATAAATTGAAGATCTCTAATAAGGACTGGTTTGACTTTATCCAAAATAAA
CGTTATTTA
ErCas12a-N787A-AA (SEQ ID NO: 148)
MNNGTNNFQNFIGISSLQKTLRNALIPTETTQQFIVKNGIIKEDELRGENRQILKDIMDDYYRGFISETLSSIDDIDWTSLFEK
MEIQLKNGDNKDTLIKEQTEYRKAIHKKFANDDRFKNMFSAKLISDILPEFVIHNNNYSASEKEEKTQVIKLESRFATSFKDYF
KNRANCFSADDISSSSCHRIVNDNAEIFFSNALVYRRIVKSLSNDDINKISGDMKDSLKEMSLEEIYSYEKYGEFITQEGISFY
NDICGKVNSFMNLYCQKNKENKNLYKLQKLHKQILCIADTSYEVPYKFESDEEVYQSVNGELDNISSKHIVERLRKIGDNYNGY
NLDKIYIVSKFYESVSQKTYRDWETINTALEIHYNNILPGNGKSKADKVKKAVKNDLQKSITEINELVSNYKLCSDDNIKAETY
IHEISHILNNFEAQELKYNPEIHLVESELKASELKNVLDVIMNAFHWCSVFMTEELVDKDNNFYAELEEIYDEIYPVISLYNLV
RNYVTQKPYSTKKIKLNFGIPTLADGWSKSKEYSNNAIILMRDNLYYLGIFNAKNKPDKKIIEGNTSENKGDYKKMIYNLLPGP
NKMIPKVFLSSKTGVETYKPSAYILEGYKQNKHIKSSKDFDITFCHDLIDYFKNCIAIHPEWKNFGFDFSDTSTYEDISGFYRE
VELQGYKIDWTYISEKDIDLLQEKGQLYLFQIYNKDFSKKSTGNDNLHTMYLKNLFSEENLKDIVLKLNGEAEIFFRKSSIKNP
IIHKKGSILVNRTYEAEEKDQFGNIQIVRKAIPENIYQELYKYFNDKSDKELSDEAAKLKNVVGHHEAATNIVKDYRYTYDKYF
LHMPITINFKANKTGFINDRILQYIAKEKDLHVIGIDRGERNLIYVSVIDTCGNIVEQKSFNIVNGYDYQIKLKQQEGARQIAR
KEWKEIGKIKEIKEGYLSLVIHEISKMVIKYNAIIAMEDLSYGFKKGRFKVERQVYQKFETMLINKLNYLVFKDISITENGGLL
KGYQLTYIPDKLKNVGHQCGCIFYVPAAYTSKIDPTTGFVNIFKFKDLTVDAKREFIKKFDSIRYDSEKNLFCFTFDYNNFITQ
NTVMSKSSWSVYTYGVRIKRRFVNGRFSNESDTIDITKDMEKTLEMTDINWRDGHDLRQDIIDYEIVQHIFEIFRLTVQMRNSL
SELEDRDYDRLISPVLNENNIFYDSAKAGDALPKDADANGAYCIALKGLYEIKQITENWKEDGKFSRDKLKISNKDWFDFIQNK
RYL
ErCas12a-A825R-NT (SEQ ID NO: 149)
atgAATAACGGTACCAATAACTTTCAAAATTTTATCGGGATCTCCTCGTTGCAAAAAACTCTTCGTAATGCTTTAATCCCGACT
GAGACAACACAGCAGTTCATCGTTAAAAACGGCATCATTAAAGAAGATGAGCTGCGCGGCGAGAACCGTCAGATTTTAAAGGAC
ATCATGGACGACTATTACCGTGGGTTCATCTCAGAAACATTAAGCAGCATCGATGATATCGACTGGACCTCACTGTTTGAGAAG
ATGGAGATTCAACTTAAGAATGGAGACAACAAAGACACTTTAATTAAGGAGCAGACGGAATATCGTAAAGCTATCCATAAAAAA
TTTGCAAACGATGACCGTTTCAAAAATATGTTTTCCGCAAAATTGATTAGCGACATTTTACCTGAATTCGTAATCCATAACAAC
AACTATTCCGCATCTGAAAAAGAGGAGAAGACCCAAGTTATCAAACTTTTTTCACGTTTCGCGACATCTTTTAAAGACTACTTT
AAGAATCGTGCGAATTGTTTCAGTGCAGATGATATTTCGTCTAGTTCATGTCACCGTATCGTGAATGACAACGCTGAGATTTTC
TTTTCTAATGCGTTGGTGTATCGCCGCATCGTAAAGTCCTTGTCGAATGATGATATCAACAAAATTAGTGGTGACATGAAAGAC
TCCCTGAAAGAAATGTCATTAGAGGAGATTTACAGCTACGAAAAATACGGAGAGTTCATCACTCAGGAAGGTATCTCCTTTTAC
AACGATATTTGCGGCAAAGTTAATAGTTTCATGAATCTGTATTGTCAGAAGAATAAGGAAAACAAGAATCTGTACAAGTTACAA
AAGCTTCATAAACAGATCTTGTGCATCGCCGACACGTCTTATGAAGTCCCGTATAAATTTGAAAGCGACGAAGAAGTATATCAG
AGTGTGAATGGATTCTTGGACAATATCTCATCAAAACACATTGTTGAACGTTTGCGCAAAATCGGCGACAACTATAACGGATAC
AACTTGGATAAAATTTATATCGTATCAAAATTTTATGAATCAGTATCCCAAAAGACTTACCGTGATTGGGAGACTATTAATACG
GCGTTAGAAATCCATTACAACAACATTCTGCCGGGTAACGGTAAATCGAAAGCGGACAAAGTGAAGAAGGCGGTTAAGAACGAT
CTTCAGAAGTCTATCACGGAGATTAATGAGCTGGTTTCCAATTACAAGTTGTGCTCGGATGATAACATCAAAGCTGAAACCTAT
ATCCATGAAATTTCTCATATTCTTAATAACTTCGAGGCACAAGAATTAAAATATAACCCAGAAATTCATCTGGTTGAGAGCGAA
CTTAAAGCTTCAGAATTAAAAAATGTTTTGGACGTAATTATGAACGCCTTCCATTGGTGCAGCGTGTTTATGACAGAGGAGTTA
GTAGATAAGGATAACAACTTTTATGCAGAATTGGAAGAGATCTATGATGAGATCTATCCAGTGATTTCACTGTATAACTTAGTC
CGTAATTACGTCACTCAGAAGCCGTACTCAACTAAAAAGATCAAGTTAAATTTTGGAATTCCGACATTGGCGGATGGTTGGAGT
AAGTCTAAGGAATACTCAAATAACGCTATTATCTTAATGCGTGACAACCTGTATTACTTGGGTATTTTCAATGCCAAAAATAAG
CCCGATAAAAAAATCATTGAAGGGAATACTTCAGAAAATAAGGGAGATTACAAAAAAATGATTTATAACCTTTTGCCAGGCCCA
AACAAAATGATCCCCAAGGTGTTTTTGAGTAGTAAGACGGGAGTAGAAACATATAAGCCATCAGCGTACATTCTTGAAGGGTAC
AAACAAAATAAACACATCAAGAGCAGCAAGGACTTTGACATTACATTTTGTCATGACTTAATCGACTACTTTAAAAATTGCATT
GCCATTCACCCTGAGTGGAAAAATTTTGGTTTCGACTTCAGTGATACCTCTACCTATGAAGATATCTCTGGTTTTTATCGTGAG
GTAGAACTTCAGGGTTACAAGATCGATTGGACGTACATTTCCGAGAAAGACATTGATCTTTTACAAGAGAAGGGTCAGCTTTAC
TTATTTCAGATCTACAATAAAGACTTTTCGAAAAAATCCACGGGCAACGACAACCTTCATACAATGTACTTAAAGAACCTGTTC
TCTGAAGAAAACTTGAAAGATATCGTGCTTAAATTGAATGGCGAGGCCGAGATTTTTTTCCGTAAAAGCTCGATTAAGAATCCC
ATCATCCACAAGAAAGGCAGCATTCTGGTAAATCGTACCTATGAAGCGGAGGAAAAGGACCAATTTGGTAATATTCAGATTGTC
CGTAAGAACATCCCTGAAAATATCTATCAAGAATTATATAAATATTTCAACGATAAGTCGGACAAGGAACTTAGCGATGAAGCC
GCGAAGTTGAAAAATGTTGTTGGTCACCACGAAGCACGTACAAACATTGTGAAAGACTATCGCTACACTTACGATAAGTACTTT
TTACATATGCCTATTACGATTAACTTTAAGGCAAATAAGACAGGTTTTATCAACGACCGTATCCTGCAATATATTGCAAAAGAG
AAGGACCTGCATGTCATTGGGATTGATCGCGGTGAACGCAATCTGATTTACGTGAGTGTTATTGATACCTGCGGTAATATTGTT
GAGCAAAAGTCTTTTAATATCGTTAATGGTTACGACTACCAAATTAAGCTTAAACAACAGGAAGGTGCCCGCCAGATCGCCCGT
AAGGAGTGGAAGGAAATCGGAAAAATTAAGGAAATCAAAGAGGGATATCTGAGCTTGGTTATTCATGAAATCTCAAAGATGGTT
ATTAAGTACAACGCCATCATCGCTATGGAAGACTTATCGTATGGGTTTAAAAAGGGTCGTTTCAAAGTTGAGCGCCAGGTCTAC
CAAAAGTTTGAAACGATGCTTATTAATAAATTAAACTACTTGGTTTTCAAAGATATCTCTATTACCGAGAATGGAGGTTTACTG
AAAGGATACCAGTTAACGTATATCCCCGATAAGCTTAAAAACGTGGGCCATCAGTGTGGCTGTATTTTCTATGTGCCCGCGGCA
TATACATCAAAAATTGACCCGACGACGGGTTTCGTTAATATCTTCAAGTTCAAAGATCTGACAGTTGATGCAAAACGCGAATTC
ATTAAGAAGTTCGATAGTATTCGCTATGACTCCGAGAAAAATTTGTTTTGCTTCACTTTTGACTACAATAACTTTATTACTCAG
AATACAGTCATGAGTAAAAGCTCCTGGTCGGTTTACACGTACGGGGTACGCATCAAACGTCGTTTTGTGAATGGTCGTTTTAGT
AATGAGTCGGATACAATTGATATTACCAAGGATATGGAGAAGACTCTGGAAATGACAGACATCAATTGGCGTGATGGACATGAT
TTGCGTCAGGACATTATCGACTATGAGATTGTGCAGCATATTTTCGAAATTTTTCGCCTGACGGTGCAAATGCGTAATTCCTTA
AGCGAACTGGAAGATCGCGACTATGACCGCTTAATTTCTCCTGTGCTGAATGAGAACAACATCTTCTATGACTCAGCGAAAGCC
GGGGACGCTTTGCCAAAGGATGCAGATGCTAACGGTGCATATTGTATTGCTCTGAAAGGCCTTTACGAGATCAAACAAATTACT
GAAAACTGGAAGGAAGATGGAAAGTTTTCCCGTGATAAATTGAAGATCTCTAATAAGGACTGGTTTGACTTTATCCAAAATAAA
CGTTATTTA
ErCas12a-A825R-AA (SEQ ID NO: 150)
MNNGTNNFQNFIGISSLQKTLRNALIPTETTQQFIVKNGIIKEDELRGENRQILKDIMDDYYRGFISETLSSIDDIDWTSLFEK
MEIQLKNGDNKDTLIKEQTEYRKAIHKKFANDDRFKNMFSAKLISDILPEFVIHNNNYSASEKEEKTQVIKLFSRFATSFKDYF
KNRANCESADDISSSSCHRIVNDNAEIFFSNALVYRRIVKSLSNDDINKISGDMKDSLKEMSLEEIYSYEKYGEFITQEGISFY
NDICGKVNSFMNLYCQKNKENKNLYKLQKLHKQILCIADTSYEVPYKFESDEEVYQSVNGELDNISSKHIVERLRKIGDNYNGY
NLDKIYIVSKFYESVSQKTYRDWETINTALEIHYNNILPGNGKSKADKVKKAVKNDLQKSITEINELVSNYKLCSDDNIKAETY
IHEISHILNNFEAQELKYNPEIHLVESELKASELKNVLDVIMNAFHWCSVFMTEELVDKDNNFYAELEEIYDEIYPVISLYNLV
RNYVTQKPYSTKKIKLNFGIPTLADGWSKSKEYSNNAIILMRDNLYYLGIFNAKNKPDKKIIEGNTSENKGDYKKMIYNLLPGP
NKMIPKVFLSSKTGVETYKPSAYILEGYKQNKHIKSSKDFDITFCHDLIDYFKNCIAIHPEWKNFGFDFSDTSTYEDISGFYRE
VELQGYKIDWTYISEKDIDLLQEKGQLYLFQIYNKDFSKKSTGNDNLHTMYLKNLFSEENLKDIVLKLNGEAEIFFRKSSIKNP
IIHKKGSILVNRTYEAEEKDQFGNIQIVRKNIPENIYQELYKYFNDKSDKELSDEAAKLKNVVGHHEARTNIVKDYRYTYDKYF
LHMPITINFKANKTGFINDRILQYIAKEKDLHVIGIDRGERNLIYVSVIDTCGNIVEQKSFNIVNGYDYQIKLKQQEGARQIAR
KEWKEIGKIKEIKEGYLSLVIHEISKMVIKYNAIIAMEDLSYGFKKGRFKVERQVYQKFETMLINKLNYLVFKDISITENGGLL
KGYQLTYIPDKLKNVGHQCGCIFYVPAAYTSKIDPTTGFVNIFKFKDLTVDAKREFIKKFDSIRYDSEKNLFCFTFDYNNFITQ
NTVMSKSSWSVYTYGVRIKRRFVNGRFSNESDTIDITKDMEKTLEMTDINWRDGHDLRQDIIDYEIVQHIFEIFRLTVQMRNSL
SELEDRDYDRLISPVLNENNIFYDSAKAGDALPKDADANGAYCIALKGLYEIKQITENWKEDGKFSRDKLKISNKDWFDFIQNK
RYL
ErCas12a-T826K-NT (SEQ ID NO: 151)
atgAATAACGGTACCAATAACTTTCAAAATTTTATCGGGATCTCCTCGTTGCAAAAAACTCTTCGTAATGCTTTAATCCCGACT
GAGACAACACAGCAGTTCATCGTTAAAAACGGCATCATTAAAGAAGATGAGCTGCGCGGCGAGAACCGTCAGATTTTAAAGGAC
ATCATGGACGACTATTACCGTGGGTTCATCTCAGAAACATTAAGCAGCATCGATGATATCGACTGGACCTCACTGTTTGAGAAG
ATGGAGATTCAACTTAAGAATGGAGACAACAAAGACACTTTAATTAAGGAGCAGACGGAATATCGTAAAGCTATCCATAAAAAA
TTTGCAAACGATGACCGTTTCAAAAATATGTTTTCCGCAAAATTGATTAGCGACATTTTACCTGAATTCGTAATCCATAACAAC
AACTATTCCGCATCTGAAAAAGAGGAGAAGACCCAAGTTATCAAACTTTTTTCACGTTTCGCGACATCTTTTAAAGACTACTTT
AAGAATCGTGCGAATTGTTTCAGTGCAGATGATATTTCGTCTAGTTCATGTCACCGTATCGTGAATGACAACGCTGAGATTTTC
TTTTCTAATGCGTTGGTGTATCGCCGCATCGTAAAGTCCTTGTCGAATGATGATATCAACAAAATTAGTGGTGACATGAAAGAC
TCCCTGAAAGAAATGTCATTAGAGGAGATTTACAGCTACGAAAAATACGGAGAGTTCATCACTCAGGAAGGTATCTCCTTTTAC
AACGATATTTGCGGCAAAGTTAATAGTTTCATGAATCTGTATTGTCAGAAGAATAAGGAAAACAAGAATCTGTACAAGTTACAA
AAGCTTCATAAACAGATCTTGTGCATCGCCGACACGTCTTATGAAGTCCCGTATAAATTTGAAAGCGACGAAGAAGTATATCAG
AGTGTGAATGGATTCTTGGACAATATCTCATCAAAACACATTGTTGAACGTTTGCGCAAAATCGGCGACAACTATAACGGATAC
AACTTGGATAAAATTTATATCGTATCAAAATTTTATGAATCAGTATCCCAAAAGACTTACCGTGATTGGGAGACTATTAATACG
GCGTTAGAAATCCATTACAACAACATTCTGCCGGGTAACGGTAAATCGAAAGCGGACAAAGTGAAGAAGGCGGTTAAGAACGAT
CTTCAGAAGTCTATCACGGAGATTAATGAGCTGGTTTCCAATTACAAGTTGTGCTCGGATGATAACATCAAAGCTGAAACCTAT
ATCCATGAAATTTCTCATATTCTTAATAACTTCGAGGCACAAGAATTAAAATATAACCCAGAAATTCATCTGGTTGAGAGCGAA
CTTAAAGCTTCAGAATTAAAAAATGTTTTGGACGTAATTATGAACGCCTTCCATTGGTGCAGCGTGTTTATGACAGAGGAGTTA
GTAGATAAGGATAACAACTTTTATGCAGAATTGGAAGAGATCTATGATGAGATCTATCCAGTGATTTCACTGTATAACTTAGTC
CGTAATTACGTCACTCAGAAGCCGTACTCAACTAAAAAGATCAAGTTAAATTTTGGAATTCCGACATTGGCGGATGGTTGGAGT
AAGTCTAAGGAATACTCAAATAACGCTATTATCTTAATGCGTGACAACCTGTATTACTTGGGTATTTTCAATGCCAAAAATAAG
CCCGATAAAAAAATCATTGAAGGGAATACTTCAGAAAATAAGGGAGATTACAAAAAAATGATTTATAACCTTTTGCCAGGCCCA
AACAAAATGATCCCCAAGGTGTTTTTGAGTAGTAAGACGGGAGTAGAAACATATAAGCCATCAGCGTACATTCTTGAAGGGTAC
AAACAAAATAAACACATCAAGAGCAGCAAGGACTTTGACATTACATTTTGTCATGACTTAATCGACTACTTTAAAAATTGCATT
GCCATTCACCCTGAGTGGAAAAATTTTGGTTTCGACTTCAGTGATACCTCTACCTATGAAGATATCTCTGGTTTTTATCGTGAG
GTAGAACTTCAGGGTTACAAGATCGATTGGACGTACATTTCCGAGAAAGACATTGATCTTTTACAAGAGAAGGGTCAGCTTTAC
TTATTTCAGATCTACAATAAAGACTTTTCGAAAAAATCCACGGGCAACGACAACCTTCATACAATGTACTTAAAGAACCTGTTC
TCTGAAGAAAACTTGAAAGATATCGTGCTTAAATTGAATGGCGAGGCCGAGATTTTTTTCCGTAAAAGCTCGATTAAGAATCCC
ATCATCCACAAGAAAGGCAGCATTCTGGTAAATCGTACCTATGAAGCGGAGGAAAAGGACCAATTTGGTAATATTCAGATTGTC
CGTAAGAACATCCCTGAAAATATCTATCAAGAATTATATAAATATTTCAACGATAAGTCGGACAAGGAACTTAGCGATGAAGCC
GCGAAGTTGAAAAATGTTGTTGGTCACCACGAAGCAGCAAAAAACATTGTGAAAGACTATCGCTACACTTACGATAAGTACTTT
TTACATATGCCTATTACGATTAACTTTAAGGCAAATAAGACAGGTTTTATCAACGACCGTATCCTGCAATATATTGCAAAAGAG
AAGGACCTGCATGTCATTGGGATTGATCGCGGTGAACGCAATCTGATTTACGTGAGTGTTATTGATACCTGCGGTAATATTGTT
GAGCAAAAGTCTTTTAATATCGTTAATGGTTACGACTACCAAATTAAGCTTAAACAACAGGAAGGTGCCCGCCAGATCGCCCGT
AAGGAGTGGAAGGAAATCGGAAAAATTAAGGAAATCAAAGAGGGATATCTGAGCTTGGTTATTCATGAAATCTCAAAGATGGTT
ATTAAGTACAACGCCATCATCGCTATGGAAGACTTATCGTATGGGTTTAAAAAGGGTCGTTTCAAAGTTGAGCGCCAGGTCTAC
CAAAAGTTTGAAACGATGCTTATTAATAAATTAAACTACTTGGTTTTCAAAGATATCTCTATTACCGAGAATGGAGGTTTACTG
AAAGGATACCAGTTAACGTATATCCCCGATAAGCTTAAAAACGTGGGCCATCAGTGTGGCTGTATTTTCTATGTGCCCGCGGCA
TATACATCAAAAATTGACCCGACGACGGGTTTCGTTAATATCTTCAAGTTCAAAGATCTGACAGTTGATGCAAAACGCGAATTC
ATTAAGAAGTTCGATAGTATTCGCTATGACTCCGAGAAAAATTTGTTTTGCTTCACTTTTGACTACAATAACTTTATTACTCAG
AATACAGTCATGAGTAAAAGCTCCTGGTCGGTTTACACGTACGGGGTACGCATCAAACGTCGTTTTGTGAATGGTCGTTTTAGT
AATGAGTCGGATACAATTGATATTACCAAGGATATGGAGAAGACTCTGGAAATGACAGACATCAATTGGCGTGATGGACATGAT
TTGCGTCAGGACATTATCGACTATGAGATTGTGCAGCATATTTTCGAAATTTTTCGCCTGACGGTGCAAATGCGTAATTCCTTA
AGCGAACTGGAAGATCGCGACTATGACCGCTTAATTTCTCCTGTGCTGAATGAGAACAACATCTTCTATGACTCAGCGAAAGCC
GGGGACGCTTTGCCAAAGGATGCAGATGCTAACGGTGCATATTGTATTGCTCTGAAAGGCCTTTACGAGATCAAACAAATTACT
GAAAACTGGAAGGAAGATGGAAAGTTTTCCCGTGATAAATTGAAGATCTCTAATAAGGACTGGTTTGACTTTATCCAAAATAAA
CGTTATTTA
ErCas12a-T826K-AA (SEQ ID NO: 152)
MNNGTNNFQNFIGISSLQKTLRNALIPTETTQQFIVKNGIIKEDELRGENRQILKDIMDDYYRGFISETLSSIDDIDWTSLFEK
MEIQLKNGDNKDTLIKEQTEYRKAIHKKFANDDRFKNMFSAKLISDILPEFVIHNNNYSASEKEEKTQVIKLFSRFATSFKDYF
KNRANCESADDISSSSCHRIVNDNAEIFFSNALVYRRIVKSLSNDDINKISGDMKDSLKEMSLEEIYSYEKYGEFITQEGISFY
NDICGKVNSFMNLYCQKNKENKNLYKLQKLHKQILCIADTSYEVPYKFESDEEVYQSVNGELDNISSKHIVERLRKIGDNYNGY
NLDKIYIVSKFYESVSQKTYRDWETINTALEIHYNNILPGNGKSKADKVKKAVKNDLQKSITEINELVSNYKLCSDDNIKAETY
IHEISHILNNFEAQELKYNPEIHLVESELKASELKNVLDVIMNAFHWCSVFMTEELVDKDNNFYAELEEIYDEIYPVISLYNLV
RNYVTQKPYSTKKIKLNFGIPTLADGWSKSKEYSNNAIILMRDNLYYLGIFNAKNKPDKKIIEGNTSENKGDYKKMIYNLLPGP
NKMIPKVFLSSKTGVETYKPSAYILEGYKQNKHIKSSKDFDITFCHDLIDYFKNCIAIHPEWKNFGFDFSDTSTYEDISGFYRE
VELQGYKIDWTYISEKDIDLLQEKGQLYLFQIYNKDFSKKSTGNDNLHTMYLKNLFSEENLKDIVLKLNGEAEIFFRKSSIKNP
IIHKKGSILVNRTYEAEEKDQFGNIQIVRKNIPENIYQELYKYFNDKSDKELSDEAAKLKNVVGHHEAAKNIVKDYRYTYDKYF
LHMPITINFKANKTGFINDRILQYIAKEKDLHVIGIDRGERNLIYVSVIDTCGNIVEQKSFNIVNGYDYQIKLKQQEGARQIAR
KEWKEIGKIKEIKEGYLSLVIHEISKMVIKYNAIIAMEDLSYGFKKGRFKVERQVYQKFETMLINKLNYLVFKDISITENGGLL
KGYQLTYIPDKLKNVGHQCGCIFYVPAAYTSKIDPTTGFVNIFKFKDLTVDAKREFIKKFDSIRYDSEKNLFCFTFDYNNFITQ
NTVMSKSSWSVYTYGVRIKRRFVNGRFSNESDTIDITKDMEKTLEMTDINWRDGHDLRQDIIDYEIVQHIFEIFRLTVQMRNSL
SELEDRDYDRLISPVLNENNIFYDSAKAGDALPKDADANGAYCIALKGLYEIKQITENWKEDGKFSRDKLKISNKDWFDFIQNK
RYL
ErCas12a-T826F-NT (SEQ ID NO: 153)
atgAATAACGGTACCAATAACTTTCAAAATTTTATCGGGATCTCCTCGTTGCAAAAAACTCTTCGTAATGCTTTAATCCCGACT
GAGACAACACAGCAGTTCATCGTTAAAAACGGCATCATTAAAGAAGATGAGCTGCGCGGCGAGAACCGTCAGATTTTAAAGGAC
ATCATGGACGACTATTACCGTGGGTTCATCTCAGAAACATTAAGCAGCATCGATGATATCGACTGGACCTCACTGTTTGAGAAG
ATGGAGATTCAACTTAAGAATGGAGACAACAAAGACACTTTAATTAAGGAGCAGACGGAATATCGTAAAGCTATCCATAAAAAA
TTTGCAAACGATGACCGTTTCAAAAATATGTTTTCCGCAAAATTGATTAGCGACATTTTACCTGAATTCGTAATCCATAACAAC
AACTATTCCGCATCTGAAAAAGAGGAGAAGACCCAAGTTATCAAACTTTTTTCACGTTTCGCGACATCTTTTAAAGACTACTTT
AAGAATCGTGCGAATTGTTTCAGTGCAGATGATATTTCGTCTAGTTCATGTCACCGTATCGTGAATGACAACGCTGAGATTTTC
TTTTCTAATGCGTTGGTGTATCGCCGCATCGTAAAGTCCTTGTCGAATGATGATATCAACAAAATTAGTGGTGACATGAAAGAC
TCCCTGAAAGAAATGTCATTAGAGGAGATTTACAGCTACGAAAAATACGGAGAGTTCATCACTCAGGAAGGTATCTCCTTTTAC
AACGATATTTGCGGCAAAGTTAATAGTTTCATGAATCTGTATTGTCAGAAGAATAAGGAAAACAAGAATCTGTACAAGTTACAA
AAGCTTCATAAACAGATCTTGTGCATCGCCGACACGTCTTATGAAGTCCCGTATAAATTTGAAAGCGACGAAGAAGTATATCAG
AGTGTGAATGGATTCTTGGACAATATCTCATCAAAACACATTGTTGAACGTTTGCGCAAAATCGGCGACAACTATAACGGATAC
AACTTGGATAAAATTTATATCGTATCAAAATTTTATGAATCAGTATCCCAAAAGACTTACCGTGATTGGGAGACTATTAATACG
GCGTTAGAAATCCATTACAACAACATTCTGCCGGGTAACGGTAAATCGAAAGCGGACAAAGTGAAGAAGGCGGTTAAGAACGAT
CTTCAGAAGTCTATCACGGAGATTAATGAGCTGGTTTCCAATTACAAGTTGTGCTCGGATGATAACATCAAAGCTGAAACCTAT
ATCCATGAAATTTCTCATATTCTTAATAACTTCGAGGCACAAGAATTAAAATATAACCCAGAAATTCATCTGGTTGAGAGCGAA
CTTAAAGCTTCAGAATTAAAAAATGTTTTGGACGTAATTATGAACGCCTTCCATTGGTGCAGCGTGTTTATGACAGAGGAGTTA
GTAGATAAGGATAACAACTTTTATGCAGAATTGGAAGAGATCTATGATGAGATCTATCCAGTGATTTCACTGTATAACTTAGTC
CGTAATTACGTCACTCAGAAGCCGTACTCAACTAAAAAGATCAAGTTAAATTTTGGAATTCCGACATTGGCGGATGGTTGGAGT
AAGTCTAAGGAATACTCAAATAACGCTATTATCTTAATGCGTGACAACCTGTATTACTTGGGTATTTTCAATGCCAAAAATAAG
CCCGATAAAAAAATCATTGAAGGGAATACTTCAGAAAATAAGGGAGATTACAAAAAAATGATTTATAACCTTTTGCCAGGCCCA
AACAAAATGATCCCCAAGGTGTTTTTGAGTAGTAAGACGGGAGTAGAAACATATAAGCCATCAGCGTACATTCTTGAAGGGTAC
AAACAAAATAAACACATCAAGAGCAGCAAGGACTTTGACATTACATTTTGTCATGACTTAATCGACTACTTTAAAAATTGCATT
GCCATTCACCCTGAGTGGAAAAATTTTGGTTTCGACTTCAGTGATACCTCTACCTATGAAGATATCTCTGGTTTTTATCGTGAG
GTAGAACTTCAGGGTTACAAGATCGATTGGACGTACATTTCCGAGAAAGACATTGATCTTTTACAAGAGAAGGGTCAGCTTTAC
TTATTTCAGATCTACAATAAAGACTTTTCGAAAAAATCCACGGGCAACGACAACCTTCATACAATGTACTTAAAGAACCTGTTC
TCTGAAGAAAACTTGAAAGATATCGTGCTTAAATTGAATGGCGAGGCCGAGATTTTTTTCCGTAAAAGCTCGATTAAGAATCCC
ATCATCCACAAGAAAGGCAGCATTCTGGTAAATCGTACCTATGAAGCGGAGGAAAAGGACCAATTTGGTAATATTCAGATTGTC
CGTAAGAACATCCCTGAAAATATCTATCAAGAATTATATAAATATTTCAACGATAAGTCGGACAAGGAACTTAGCGATGAAGCC
GCGAAGTTGAAAAATGTTGTTGGTCACCACGAAGCAGCATTTAACATTGTGAAAGACTATCGCTACACTTACGATAAGTACTTT
TTACATATGCCTATTACGATTAACTTTAAGGCAAATAAGACAGGTTTTATCAACGACCGTATCCTGCAATATATTGCAAAAGAG
AAGGACCTGCATGTCATTGGGATTGATCGCGGTGAACGCAATCTGATTTACGTGAGTGTTATTGATACCTGCGGTAATATTGTT
GAGCAAAAGTCTTTTAATATCGTTAATGGTTACGACTACCAAATTAAGCTTAAACAACAGGAAGGTGCCCGCCAGATCGCCCGT
AAGGAGTGGAAGGAAATCGGAAAAATTAAGGAAATCAAAGAGGGATATCTGAGCTTGGTTATTCATGAAATCTCAAAGATGGTT
ATTAAGTACAACGCCATCATCGCTATGGAAGACTTATCGTATGGGTTTAAAAAGGGTCGTTTCAAAGTTGAGCGCCAGGTCTAC
CAAAAGTTTGAAACGATGCTTATTAATAAATTAAACTACTTGGTTTTCAAAGATATCTCTATTACCGAGAATGGAGGTTTACTG
AAAGGATACCAGTTAACGTATATCCCCGATAAGCTTAAAAACGTGGGCCATCAGTGTGGCTGTATTTTCTATGTGCCCGCGGCA
TATACATCAAAAATTGACCCGACGACGGGTTTCGTTAATATCTTCAAGTTCAAAGATCTGACAGTTGATGCAAAACGCGAATTC
ATTAAGAAGTTCGATAGTATTCGCTATGACTCCGAGAAAAATTTGTTTTGCTTCACTTTTGACTACAATAACTTTATTACTCAG
AATACAGTCATGAGTAAAAGCTCCTGGTCGGTTTACACGTACGGGGTACGCATCAAACGTCGTTTTGTGAATGGTCGTTTTAGT
AATGAGTCGGATACAATTGATATTACCAAGGATATGGAGAAGACTCTGGAAATGACAGACATCAATTGGCGTGATGGACATGAT
TTGCGTCAGGACATTATCGACTATGAGATTGTGCAGCATATTTTCGAAATTTTTCGCCTGACGGTGCAAATGCGTAATTCCTTA
AGCGAACTGGAAGATCGCGACTATGACCGCTTAATTTCTCCTGTGCTGAATGAGAACAACATCTTCTATGACTCAGCGAAAGCC
GGGGACGCTTTGCCAAAGGATGCAGATGCTAACGGTGCATATTGTATTGCTCTGAAAGGCCTTTACGAGATCAAACAAATTACT
GAAAACTGGAAGGAAGATGGAAAGTTTTCCCGTGATAAATTGAAGATCTCTAATAAGGACTGGTTTGACTTTATCCAAAATAAA
CGTTATTTA
ErCas12a-T826F-AA (SEQ ID NO: 154)
MNNGTNNFQNFIGISSLQKTLRNALIPTETTQQFIVKNGIIKEDELRGENRQILKDIMDDYYRGFISETLSSIDDIDWTSLFEK
MEIQLKNGDNKDTLIKEQTEYRKAIHKKFANDDRFKNMFSAKLISDILPEFVIHNNNYSASEKEEKTQVIKLFSRFATSFKDYF
KNRANCFSADDISSSSCHRIVNDNAEIFFSNALVYRRIVKSLSNDDINKISGDMKDSLKEMSLEEIYSYEKYGEFITQEGISFY
NDICGKVNSFMNLYCQKNKENKNLYKLQKLHKQILCIADTSYEVPYKFESDEEVYQSVNGELDNISSKHIVERLRKIGDNYNGY
NLDKIYIVSKFYESVSQKTYRDWETINTALEIHYNNILPGNGKSKADKVKKAVKNDLQKSITEINELVSNYKLCSDDNIKAETY
IHEISHILNNFEAQELKYNPEIHLVESELKASELKNVLDVIMNAFHWCSVFMTEELVDKDNNFYAELEEIYDEIYPVISLYNLV
RNYVTQKPYSTKKIKLNFGIPTLADGWSKSKEYSNNAIILMRDNLYYLGIFNAKNKPDKKIIEGNTSENKGDYKKMIYNLLPGP
NKMIPKVFLSSKTGVETYKPSAYILEGYKQNKHIKSSKDFDITFCHDLIDYFKNCIAIHPEWKNFGFDFSDTSTYEDISGFYRE
VELQGYKIDWTYISEKDIDLLQEKGQLYLFQIYNKDFSKKSTGNDNLHTMYLKNLFSEENLKDIVLKLNGEAEIFFRKSSIKNP
IIHKKGSILVNRTYEAEEKDQFGNIQIVRKNIPENIYQELYKYFNDKSDKELSDEAAKLKNVVGHHEAAFNIVKDYRYTYDKYF
LHMPITINFKANKTGFINDRILQYIAKEKDLHVIGIDRGERNLIYVSVIDTCGNIVEQKSFNIVNGYDYQIKLKQQEGARQIAR
KEWKEIGKIKEIKEGYLSLVIHEISKMVIKYNAIIAMEDLSYGFKKGRFKVERQVYQKFETMLINKLNYLVFKDISITENGGLL
KGYQLTYIPDKLKNVGHQCGCIFYVPAAYTSKIDPTTGFVNIFKFKDLTVDAKREFIKKFDSIRYDSEKNLFCFTFDYNNFITQ
NTVMSKSSWSVYTYGVRIKRRFVNGRFSNESDTIDITKDMEKTLEMTDINWRDGHDLRQDIIDYEIVQHIFEIFRLTVQMRNSL
SELEDRDYDRLISPVLNENNIFYDSAKAGDALPKDADANGAYCIALKGLYEIKQITENWKEDGKFSRDKLKISNKDWFDFIQNK
RYL
ErCas12a-Y832R-NT (SEQ ID NO: 155)
atgAATAACGGTACCAATAACTTTCAAAATTTTATCGGGATCTCCTCGTTGCAAAAAACTCTTCGTAATGCTTTAATCCCGACT
GAGACAACACAGCAGTTCATCGTTAAAAACGGCATCATTAAAGAAGATGAGCTGCGCGGCGAGAACCGTCAGATTTTAAAGGAC
ATCATGGACGACTATTACCGTGGGTTCATCTCAGAAACATTAAGCAGCATCGATGATATCGACTGGACCTCACTGTTTGAGAAG
ATGGAGATTCAACTTAAGAATGGAGACAACAAAGACACTTTAATTAAGGAGCAGACGGAATATCGTAAAGCTATCCATAAAAAA
TTTGCAAACGATGACCGTTTCAAAAATATGTTTTCCGCAAAATTGATTAGCGACATTTTACCTGAATTCGTAATCCATAACAAC
AACTATTCCGCATCTGAAAAAGAGGAGAAGACCCAAGTTATCAAACTTTTTTCACGTTTCGCGACATCTTTTAAAGACTACTTT
AAGAATCGTGCGAATTGTTTCAGTGCAGATGATATTTCGTCTAGTTCATGTCACCGTATCGTGAATGACAACGCTGAGATTTTC
TTTTCTAATGCGTTGGTGTATCGCCGCATCGTAAAGTCCTTGTCGAATGATGATATCAACAAAATTAGTGGTGACATGAAAGAC
TCCCTGAAAGAAATGTCATTAGAGGAGATTTACAGCTACGAAAAATACGGAGAGTTCATCACTCAGGAAGGTATCTCCTTTTAC
AACGATATTTGCGGCAAAGTTAATAGTTTCATGAATCTGTATTGTCAGAAGAATAAGGAAAACAAGAATCTGTACAAGTTACAA
AAGCTTCATAAACAGATCTTGTGCATCGCCGACACGTCTTATGAAGTCCCGTATAAATTTGAAAGCGACGAAGAAGTATATCAG
AGTGTGAATGGATTCTTGGACAATATCTCATCAAAACACATTGTTGAACGTTTGCGCAAAATCGGCGACAACTATAACGGATAC
AACTTGGATAAAATTTATATCGTATCAAAATTTTATGAATCAGTATCCCAAAAGACTTACCGTGATTGGGAGACTATTAATACG
GCGTTAGAAATCCATTACAACAACATTCTGCCGGGTAACGGTAAATCGAAAGCGGACAAAGTGAAGAAGGCGGTTAAGAACGAT
CTTCAGAAGTCTATCACGGAGATTAATGAGCTGGTTTCCAATTACAAGTTGTGCTCGGATGATAACATCAAAGCTGAAACCTAT
ATCCATGAAATTTCTCATATTCTTAATAACTTCGAGGCACAAGAATTAAAATATAACCCAGAAATTCATCTGGTTGAGAGCGAA
CTTAAAGCTTCAGAATTAAAAAATGTTTTGGACGTAATTATGAACGCCTTCCATTGGTGCAGCGTGTTTATGACAGAGGAGTTA
GTAGATAAGGATAACAACTTTTATGCAGAATTGGAAGAGATCTATGATGAGATCTATCCAGTGATTTCACTGTATAACTTAGTC
CGTAATTACGTCACTCAGAAGCCGTACTCAACTAAAAAGATCAAGTTAAATTTTGGAATTCCGACATTGGCGGATGGTTGGAGT
AAGTCTAAGGAATACTCAAATAACGCTATTATCTTAATGCGTGACAACCTGTATTACTTGGGTATTTTCAATGCCAAAAATAAG
CCCGATAAAAAAATCATTGAAGGGAATACTTCAGAAAATAAGGGAGATTACAAAAAAATGATTTATAACCTTTTGCCAGGCCCA
AACAAAATGATCCCCAAGGTGTTTTTGAGTAGTAAGACGGGAGTAGAAACATATAAGCCATCAGCGTACATTCTTGAAGGGTAC
AAACAAAATAAACACATCAAGAGCAGCAAGGACTTTGACATTACATTTTGTCATGACTTAATCGACTACTTTAAAAATTGCATT
GCCATTCACCCTGAGTGGAAAAATTTTGGTTTCGACTTCAGTGATACCTCTACCTATGAAGATATCTCTGGTTTTTATCGTGAG
GTAGAACTTCAGGGTTACAAGATCGATTGGACGTACATTTCCGAGAAAGACATTGATCTTTTACAAGAGAAGGGTCAGCTTTAC
TTATTTCAGATCTACAATAAAGACTTTTCGAAAAAATCCACGGGCAACGACAACCTTCATACAATGTACTTAAAGAACCTGTTC
TCTGAAGAAAACTTGAAAGATATCGTGCTTAAATTGAATGGCGAGGCCGAGATTTTTTTCCGTAAAAGCTCGATTAAGAATCCC
ATCATCCACAAGAAAGGCAGCATTCTGGTAAATCGTACCTATGAAGCGGAGGAAAAGGACCAATTTGGTAATATTCAGATTGTC
CGTAAGAACATCCCTGAAAATATCTATCAAGAATTATATAAATATTTCAACGATAAGTCGGACAAGGAACTTAGCGATGAAGCC
GCGAAGTTGAAAAATGTTGTTGGTCACCACGAAGCAGCAACAAACATTGTGAAAGACCGTCGCTACACTTACGATAAGTACTTT
TTACATATGCCTATTACGATTAACTTTAAGGCAAATAAGACAGGTTTTATCAACGACCGTATCCTGCAATATATTGCAAAAGAG
AAGGACCTGCATGTCATTGGGATTGATCGCGGTGAACGCAATCTGATTTACGTGAGTGTTATTGATACCTGCGGTAATATTGTT
GAGCAAAAGTCTTTTAATATCGTTAATGGTTACGACTACCAAATTAAGCTTAAACAACAGGAAGGTGCCCGCCAGATCGCCCGT
AAGGAGTGGAAGGAAATCGGAAAAATTAAGGAAATCAAAGAGGGATATCTGAGCTTGGTTATTCATGAAATCTCAAAGATGGTT
ATTAAGTACAACGCCATCATCGCTATGGAAGACTTATCGTATGGGTTTAAAAAGGGTCGTTTCAAAGTTGAGCGCCAGGTCTAC
CAAAAGTTTGAAACGATGCTTATTAATAAATTAAACTACTTGGTTTTCAAAGATATCTCTATTACCGAGAATGGAGGTTTACTG
AAAGGATACCAGTTAACGTATATCCCCGATAAGCTTAAAAACGTGGGCCATCAGTGTGGCTGTATTTTCTATGTGCCCGCGGCA
TATACATCAAAAATTGACCCGACGACGGGTTTCGTTAATATCTTCAAGTTCAAAGATCTGACAGTTGATGCAAAACGCGAATTC
ATTAAGAAGTTCGATAGTATTCGCTATGACTCCGAGAAAAATTTGTTTTGCTTCACTTTTGACTACAATAACTTTATTACTCAG
AATACAGTCATGAGTAAAAGCTCCTGGTCGGTTTACACGTACGGGGTACGCATCAAACGTCGTTTTGTGAATGGTCGTTTTAGT
AATGAGTCGGATACAATTGATATTACCAAGGATATGGAGAAGACTCTGGAAATGACAGACATCAATTGGCGTGATGGACATGAT
TTGCGTCAGGACATTATCGACTATGAGATTGTGCAGCATATTTTCGAAATTTTTCGCCTGACGGTGCAAATGCGTAATTCCTTA
AGCGAACTGGAAGATCGCGACTATGACCGCTTAATTTCTCCTGTGCTGAATGAGAACAACATCTTCTATGACTCAGCGAAAGCC
GGGGACGCTTTGCCAAAGGATGCAGATGCTAACGGTGCATATTGTATTGCTCTGAAAGGCCTTTACGAGATCAAACAAATTACT
GAAAACTGGAAGGAAGATGGAAAGTTTTCCCGTGATAAATTGAAGATCTCTAATAAGGACTGGTTTGACTTTATCCAAAATAAA
CGTTATTTA
ErCas12a-Y832R-AA (SEQ ID NO: 156)
MNNGTNNFQNFIGISSLQKTLRNALIPTETTQQFIVKNGIIKEDELRGENRQILKDIMDDYYRGFISETLSSIDDIDWTSLFEK
MEIQLKNGDNKDTLIKEQTEYRKAIHKKFANDDRFKNMFSAKLISDILPEFVIHNNNYSASEKEEKTQVIKLFSRFATSFKDYF
KNRANCFSADDISSSSCHRIVNDNAEIFFSNALVYRRIVKSLSNDDINKISGDMKDSLKEMSLEEIYSYEKYGEFITQEGISFY
NDICGKVNSFMNLYCQKNKENKNLYKLQKLHKQILCIADTSYEVPYKFESDEEVYQSVNGELDNISSKHIVERLRKIGDNYNGY
NLDKIYIVSKFYESVSQKTYRDWETINTALEIHYNNILPGNGKSKADKVKKAVKNDLQKSITEINELVSNYKLCSDDNIKAETY
IHEISHILNNFEAQELKYNPEIHLVESELKASELKNVLDVIMNAFHWCSVFMTEELVDKDNNFYAELEEIYDEIYPVISLYNLV
RNYVTQKPYSTKKIKLNFGIPTLADGWSKSKEYSNNAIILMRDNLYYLGIFNAKNKPDKKIIEGNTSENKGDYKKMIYNLLPGP
NKMIPKVFLSSKTGVETYKPSAYILEGYKQNKHIKSSKDFDITFCHDLIDYFKNCIAIHPEWKNFGFDFSDTSTYEDISGFYRE
VELQGYKIDWTYISEKDIDLLQEKGQLYLFQIYNKDFSKKSTGNDNLHTMYLKNLFSEENLKDIVLKLNGEAEIFFRKSSIKNP
IIHKKGSILVNRTYEAEEKDQFGNIQIVRKNIPENIYQELYKYFNDKSDKELSDEAAKLKNVVGHHEAATNIVKDRRYTYDKYF
LHMPITINFKANKTGFINDRILQYIAKEKDLHVIGIDRGERNLIYVSVIDTCGNIVEQKSFNIVNGYDYQIKLKQQEGARQIAR
KEWKEIGKIKEIKEGYLSLVIHEISKMVIKYNAIIAMEDLSYGFKKGRFKVERQVYQKFETMLINKLNYLVFKDISITENGGLL
KGYQLTYIPDKLKNVGHQCGCIFYVPAAYTSKIDPTTGFVNIFKFKDLTVDAKREFIKKFDSIRYDSEKNLFCFTFDYNNFITQ
NTVMSKSSWSVYTYGVRIKRRFVNGRFSNESDTIDITKDMEKTLEMTDINWRDGHDLRQDIIDYEIVQHIFEIFRLTVQMRNSL
SELEDRDYDRLISPVLNENNIFYDSAKAGDALPKDADANGAYCIALKGLYEIKQITENWKEDGKFSRDKLKISNKDWEDFIQNK
RYL
ErCas12a-Y836Q-NT (SEQ ID NO: 157)
atgAATAACGGTACCAATAACTTTCAAAATTTTATCGGGATCTCCTCGTTGCAAAAAACTCTTCGTAATGCTTTAATCCCGACT
GAGACAACACAGCAGTTCATCGTTAAAAACGGCATCATTAAAGAAGATGAGCTGCGCGGCGAGAACCGTCAGATTTTAAAGGAC
ATCATGGACGACTATTACCGTGGGTTCATCTCAGAAACATTAAGCAGCATCGATGATATCGACTGGACCTCACTGTTTGAGAAG
ATGGAGATTCAACTTAAGAATGGAGACAACAAAGACACTTTAATTAAGGAGCAGACGGAATATCGTAAAGCTATCCATAAAAAA
TTTGCAAACGATGACCGTTTCAAAAATATGTTTTCCGCAAAATTGATTAGCGACATTTTACCTGAATTCGTAATCCATAACAAC
AACTATTCCGCATCTGAAAAAGAGGAGAAGACCCAAGTTATCAAACTTTTTTCACGTTTCGCGACATCTTTTAAAGACTACTTT
AAGAATCGTGCGAATTGTTTCAGTGCAGATGATATTTCGTCTAGTTCATGTCACCGTATCGTGAATGACAACGCTGAGATTTTC
TTTTCTAATGCGTTGGTGTATCGCCGCATCGTAAAGTCCTTGTCGAATGATGATATCAACAAAATTAGTGGTGACATGAAAGAC
TCCCTGAAAGAAATGTCATTAGAGGAGATTTACAGCTACGAAAAATACGGAGAGTTCATCACTCAGGAAGGTATCTCCTTTTAC
AACGATATTTGCGGCAAAGTTAATAGTTTCATGAATCTGTATTGTCAGAAGAATAAGGAAAACAAGAATCTGTACAAGTTACAA
AAGCTTCATAAACAGATCTTGTGCATCGCCGACACGTCTTATGAAGTCCCGTATAAATTTGAAAGCGACGAAGAAGTATATCAG
AGTGTGAATGGATTCTTGGACAATATCTCATCAAAACACATTGTTGAACGTTTGCGCAAAATCGGCGACAACTATAACGGATAC
AACTTGGATAAAATTTATATCGTATCAAAATTTTATGAATCAGTATCCCAAAAGACTTACCGTGATTGGGAGACTATTAATACG
GCGTTAGAAATCCATTACAACAACATTCTGCCGGGTAACGGTAAATCGAAAGCGGACAAAGTGAAGAAGGCGGTTAAGAACGAT
CTTCAGAAGTCTATCACGGAGATTAATGAGCTGGTTTCCAATTACAAGTTGTGCTCGGATGATAACATCAAAGCTGAAACCTAT
ATCCATGAAATTTCTCATATTCTTAATAACTTCGAGGCACAAGAATTAAAATATAACCCAGAAATTCATCTGGTTGAGAGCGAA
CTTAAAGCTTCAGAATTAAAAAATGTTTTGGACGTAATTATGAACGCCTTCCATTGGTGCAGCGTGTTTATGACAGAGGAGTTA
GTAGATAAGGATAACAACTTTTATGCAGAATTGGAAGAGATCTATGATGAGATCTATCCAGTGATTTCACTGTATAACTTAGTC
CGTAATTACGTCACTCAGAAGCCGTACTCAACTAAAAAGATCAAGTTAAATTTTGGAATTCCGACATTGGCGGATGGTTGGAGT
AAGTCTAAGGAATACTCAAATAACGCTATTATCTTAATGCGTGACAACCTGTATTACTTGGGTATTTTCAATGCCAAAAATAAG
CCCGATAAAAAAATCATTGAAGGGAATACTTCAGAAAATAAGGGAGATTACAAAAAAATGATTTATAACCTTTTGCCAGGCCCA
AACAAAATGATCCCCAAGGTGTTTTTGAGTAGTAAGACGGGAGTAGAAACATATAAGCCATCAGCGTACATTCTTGAAGGGTAC
AAACAAAATAAACACATCAAGAGCAGCAAGGACTTTGACATTACATTTTGTCATGACTTAATCGACTACTTTAAAAATTGCATT
GCCATTCACCCTGAGTGGAAAAATTTTGGTTTCGACTTCAGTGATACCTCTACCTATGAAGATATCTCTGGTTTTTATCGTGAG
GTAGAACTTCAGGGTTACAAGATCGATTGGACGTACATTTCCGAGAAAGACATTGATCTTTTACAAGAGAAGGGTCAGCTTTAC
TTATTTCAGATCTACAATAAAGACTTTTCGAAAAAATCCACGGGCAACGACAACCTTCATACAATGTACTTAAAGAACCTGTTC
TCTGAAGAAAACTTGAAAGATATCGTGCTTAAATTGAATGGCGAGGCCGAGATTTTTTTCCGTAAAAGCTCGATTAAGAATCCC
ATCATCCACAAGAAAGGCAGCATTCTGGTAAATCGTACCTATGAAGCGGAGGAAAAGGACCAATTTGGTAATATTCAGATTGTC
CGTAAGAACATCCCTGAAAATATCTATCAAGAATTATATAAATATTTCAACGATAAGTCGGACAAGGAACTTAGCGATGAAGCC
GCGAAGTTGAAAAATGTTGTTGGTCACCACGAAGCAGCAACAAACATTGTGAAAGACTATCGCTACACTCAGGATAAGTACTTT
TTACATATGCCTATTACGATTAACTTTAAGGCAAATAAGACAGGTTTTATCAACGACCGTATCCTGCAATATATTGCAAAAGAG
AAGGACCTGCATGTCATTGGGATTGATCGCGGTGAACGCAATCTGATTTACGTGAGTGTTATTGATACCTGCGGTAATATTGTT
GAGCAAAAGTCTTTTAATATCGTTAATGGTTACGACTACCAAATTAAGCTTAAACAACAGGAAGGTGCCCGCCAGATCGCCCGT
AAGGAGTGGAAGGAAATCGGAAAAATTAAGGAAATCAAAGAGGGATATCTGAGCTTGGTTATTCATGAAATCTCAAAGATGGTT
ATTAAGTACAACGCCATCATCGCTATGGAAGACTTATCGTATGGGTTTAAAAAGGGTCGTTTCAAAGTTGAGCGCCAGGTCTAC
CAAAAGTTTGAAACGATGCTTATTAATAAATTAAACTACTTGGTTTTCAAAGATATCTCTATTACCGAGAATGGAGGTTTACTG
AAAGGATACCAGTTAACGTATATCCCCGATAAGCTTAAAAACGTGGGCCATCAGTGTGGCTGTATTTTCTATGTGCCCGCGGCA
TATACATCAAAAATTGACCCGACGACGGGTTTCGTTAATATCTTCAAGTTCAAAGATCTGACAGTTGATGCAAAACGCGAATTC
ATTAAGAAGTTCGATAGTATTCGCTATGACTCCGAGAAAAATTTGTTTTGCTTCACTTTTGACTACAATAACTTTATTACTCAG
AATACAGTCATGAGTAAAAGCTCCTGGTCGGTTTACACGTACGGGGTACGCATCAAACGTCGTTTTGTGAATGGTCGTTTTAGT
AATGAGTCGGATACAATTGATATTACCAAGGATATGGAGAAGACTCTGGAAATGACAGACATCAATTGGCGTGATGGACATGAT
TTGCGTCAGGACATTATCGACTATGAGATTGTGCAGCATATTTTCGAAATTTTTCGCCTGACGGTGCAAATGCGTAATTCCTTA
AGCGAACTGGAAGATCGCGACTATGACCGCTTAATTTCTCCTGTGCTGAATGAGAACAACATCTTCTATGACTCAGCGAAAGCC
GGGGACGCTTTGCCAAAGGATGCAGATGCTAACGGTGCATATTGTATTGCTCTGAAAGGCCTTTACGAGATCAAACAAATTACT
GAAAACTGGAAGGAAGATGGAAAGTTTTCCCGTGATAAATTGAAGATCTCTAATAAGGACTGGTTTGACTTTATCCAAAATAAA
CGTTATTTA
ErCas12a-Y836Q-AA (SEQ ID NO: 158)
MNNGTNNFQNFIGISSLQKTLRNALIPTETTQQFIVKNGIIKEDELRGENRQILKDIMDDYYRGFISETLSSIDDIDWTSLFEK
MEIQLKNGDNKDTLIKEQTEYRKAIHKKFANDDRFKNMFSAKLISDILPEFVIHNNNYSASEKEEKTQVIKLFSRFATSFKDYF
KNRANCESADDISSSSCHRIVNDNAEIFFSNALVYRRIVKSLSNDDINKISGDMKDSLKEMSLEEIYSYEKYGEFITQEGISFY
NDICGKVNSFMNLYCQKNKENKNLYKLQKLHKQILCIADTSYEVPYKFESDEEVYQSVNGELDNISSKHIVERLRKIGDNYNGY
NLDKIYIVSKFYESVSQKTYRDWETINTALEIHYNNILPGNGKSKADKVKKAVKNDLQKSITEINELVSNYKLCSDDNIKAETY
IHEISHILNNFEAQELKYNPEIHLVESELKASELKNVLDVIMNAFHWCSVFMTEELVDKDNNFYAELEEIYDEIYPVISLYNLV
RNYVTQKPYSTKKIKLNFGIPTLADGWSKSKEYSNNAIILMRDNLYYLGIFNAKNKPDKKIIEGNTSENKGDYKKMIYNLLPGP
NKMIPKVFLSSKTGVETYKPSAYILEGYKQNKHIKSSKDFDITFCHDLIDYFKNCIAIHPEWKNFGFDFSDTSTYEDISGFYRE
VELQGYKIDWTYISEKDIDLLQEKGQLYLFQIYNKDFSKKSTGNDNLHTMYLKNLFSEENLKDIVLKLNGEAEIFFRKSSIKNP
IIHKKGSILVNRTYEAEEKDQFGNIQIVRKNIPENIYQELYKYFNDKSDKELSDEAAKLKNVVGHHEAATNIVKDYRYTQDKYF
LHMPITINFKANKTGFINDRILQYIAKEKDLHVIGIDRGERNLIYVSVIDTCGNIVEQKSFNIVNGYDYQIKLKQQEGARQIAR
KEWKEIGKIKEIKEGYLSLVIHEISKMVIKYNAIIAMEDLSYGFKKGRFKVERQVYQKFETMLINKLNYLVFKDISITENGGLL
KGYQLTYIPDKLKNVGHQCGCIFYVPAAYTSKIDPTTGFVNIFKFKDLTVDAKREFIKKFDSIRYDSEKNLFCFTEDYNNFITQ
NTVMSKSSWSVYTYGVRIKRRFVNGRFSNESDTIDITKDMEKTLEMTDINWRDGHDLRQDIIDYEIVQHIFEIFRLTVQMRNSL
SELEDRDYDRLISPVLNENNIFYDSAKAGDALPKDADANGAYCIALKGLYEIKQITENWKEDGKFSRDKLKISNKDWFDFIQNK
RYL
ErCas12a-Y836K-NT (SEQ ID NO: 159)
atgAATAACGGTACCAATAACTTTCAAAATTTTATCGGGATCTCCTCGTTGCAAAAAACTCTTCGTAATGCTTTAATCCCGACT
GAGACAACACAGCAGTTCATCGTTAAAAACGGCATCATTAAAGAAGATGAGCTGCGCGGCGAGAACCGTCAGATTTTAAAGGAC
ATCATGGACGACTATTACCGTGGGTTCATCTCAGAAACATTAAGCAGCATCGATGATATCGACTGGACCTCACTGTTTGAGAAG
ATGGAGATTCAACTTAAGAATGGAGACAACAAAGACACTTTAATTAAGGAGCAGACGGAATATCGTAAAGCTATCCATAAAAAA
TTTGCAAACGATGACCGTTTCAAAAATATGTTTTCCGCAAAATTGATTAGCGACATTTTACCTGAATTCGTAATCCATAACAAC
AACTATTCCGCATCTGAAAAAGAGGAGAAGACCCAAGTTATCAAACTTTTTTCACGTTTCGCGACATCTTTTAAAGACTACTTT
AAGAATCGTGCGAATTGTTTCAGTGCAGATGATATTTCGTCTAGTTCATGTCACCGTATCGTGAATGACAACGCTGAGATTTTC
TTTTCTAATGCGTTGGTGTATCGCCGCATCGTAAAGTCCTTGTCGAATGATGATATCAACAAAATTAGTGGTGACATGAAAGAC
TCCCTGAAAGAAATGTCATTAGAGGAGATTTACAGCTACGAAAAATACGGAGAGTTCATCACTCAGGAAGGTATCTCCTTTTAC
AACGATATTTGCGGCAAAGTTAATAGTTTCATGAATCTGTATTGTCAGAAGAATAAGGAAAACAAGAATCTGTACAAGTTACAA
AAGCTTCATAAACAGATCTTGTGCATCGCCGACACGTCTTATGAAGTCCCGTATAAATTTGAAAGCGACGAAGAAGTATATCAG
AGTGTGAATGGATTCTTGGACAATATCTCATCAAAACACATTGTTGAACGTTTGCGCAAAATCGGCGACAACTATAACGGATAC
AACTTGGATAAAATTTATATCGTATCAAAATTTTATGAATCAGTATCCCAAAAGACTTACCGTGATTGGGAGACTATTAATACG
GCGTTAGAAATCCATTACAACAACATTCTGCCGGGTAACGGTAAATCGAAAGCGGACAAAGTGAAGAAGGCGGTTAAGAACGAT
CTTCAGAAGTCTATCACGGAGATTAATGAGCTGGTTTCCAATTACAAGTTGTGCTCGGATGATAACATCAAAGCTGAAACCTAT
ATCCATGAAATTTCTCATATTCTTAATAACTTCGAGGCACAAGAATTAAAATATAACCCAGAAATTCATCTGGTTGAGAGCGAA
CTTAAAGCTTCAGAATTAAAAAATGTTTTGGACGTAATTATGAACGCCTTCCATTGGTGCAGCGTGTTTATGACAGAGGAGTTA
GTAGATAAGGATAACAACTTTTATGCAGAATTGGAAGAGATCTATGATGAGATCTATCCAGTGATTTCACTGTATAACTTAGTC
CGTAATTACGTCACTCAGAAGCCGTACTCAACTAAAAAGATCAAGTTAAATTTTGGAATTCCGACATTGGCGGATGGTTGGAGT
AAGTCTAAGGAATACTCAAATAACGCTATTATCTTAATGCGTGACAACCTGTATTACTTGGGTATTTTCAATGCCAAAAATAAG
CCCGATAAAAAAATCATTGAAGGGAATACTTCAGAAAATAAGGGAGATTACAAAAAAATGATTTATAACCTTTTGCCAGGCCCA
AACAAAATGATCCCCAAGGTGTTTTTGAGTAGTAAGACGGGAGTAGAAACATATAAGCCATCAGCGTACATTCTTGAAGGGTAC
AAACAAAATAAACACATCAAGAGCAGCAAGGACTTTGACATTACATTTTGTCATGACTTAATCGACTACTTTAAAAATTGCATT
GCCATTCACCCTGAGTGGAAAAATTTTGGTTTCGACTTCAGTGATACCTCTACCTATGAAGATATCTCTGGTTTTTATCGTGAG
GTAGAACTTCAGGGTTACAAGATCGATTGGACGTACATTTCCGAGAAAGACATTGATCTTTTACAAGAGAAGGGTCAGCTTTAC
TTATTTCAGATCTACAATAAAGACTTTTCGAAAAAATCCACGGGCAACGACAACCTTCATACAATGTACTTAAAGAACCTGTTC
TCTGAAGAAAACTTGAAAGATATCGTGCTTAAATTGAATGGCGAGGCCGAGATTTTTTTCCGTAAAAGCTCGATTAAGAATCCC
ATCATCCACAAGAAAGGCAGCATTCTGGTAAATCGTACCTATGAAGCGGAGGAAAAGGACCAATTTGGTAATATTCAGATTGTC
CGTAAGAACATCCCTGAAAATATCTATCAAGAATTATATAAATATTTCAACGATAAGTCGGACAAGGAACTTAGCGATGAAGCC
GCGAAGTTGAAAAATGTTGTTGGTCACCACGAAGCAGCAACAAACATTGTGAAAGACTATCGCTACACTAAAGATAAGTACTTT
TTACATATGCCTATTACGATTAACTTTAAGGCAAATAAGACAGGTTTTATCAACGACCGTATCCTGCAATATATTGCAAAAGAG
AAGGACCTGCATGTCATTGGGATTGATCGCGGTGAACGCAATCTGATTTACGTGAGTGTTATTGATACCTGCGGTAATATTGTT
GAGCAAAAGTCTTTTAATATCGTTAATGGTTACGACTACCAAATTAAGCTTAAACAACAGGAAGGTGCCCGCCAGATCGCCCGT
AAGGAGTGGAAGGAAATCGGAAAAATTAAGGAAATCAAAGAGGGATATCTGAGCTTGGTTATTCATGAAATCTCAAAGATGGTT
ATTAAGTACAACGCCATCATCGCTATGGAAGACTTATCGTATGGGTTTAAAAAGGGTCGTTTCAAAGTTGAGCGCCAGGTCTAC
CAAAAGTTTGAAACGATGCTTATTAATAAATTAAACTACTTGGTTTTCAAAGATATCTCTATTACCGAGAATGGAGGTTTACTG
AAAGGATACCAGTTAACGTATATCCCCGATAAGCTTAAAAACGTGGGCCATCAGTGTGGCTGTATTTTCTATGTGCCCGCGGCA
TATACATCAAAAATTGACCCGACGACGGGTTTCGTTAATATCTTCAAGTTCAAAGATCTGACAGTTGATGCAAAACGCGAATTC
ATTAAGAAGTTCGATAGTATTCGCTATGACTCCGAGAAAAATTTGTTTTGCTTCACTTTTGACTACAATAACTTTATTACTCAG
AATACAGTCATGAGTAAAAGCTCCTGGTCGGTTTACACGTACGGGGTACGCATCAAACGTCGTTTTGTGAATGGTCGTTTTAGT
AATGAGTCGGATACAATTGATATTACCAAGGATATGGAGAAGACTCTGGAAATGACAGACATCAATTGGCGTGATGGACATGAT
TTGCGTCAGGACATTATCGACTATGAGATTGTGCAGCATATTTTCGAAATTTTTCGCCTGACGGTGCAAATGCGTAATTCCTTA
AGCGAACTGGAAGATCGCGACTATGACCGCTTAATTTCTCCTGTGCTGAATGAGAACAACATCTTCTATGACTCAGCGAAAGCC
GGGGACGCTTTGCCAAAGGATGCAGATGCTAACGGTGCATATTGTATTGCTCTGAAAGGCCTTTACGAGATCAAACAAATTACT
GAAAACTGGAAGGAAGATGGAAAGTTTTCCCGTGATAAATTGAAGATCTCTAATAAGGACTGGTTTGACTTTATCCAAAATAAA
CGTTATTTA
ErCas12a-Y836K-AA (SEQ ID NO: 160)
MNNGTNNFQNFIGISSLQKTLRNALIPTETTQQFIVKNGIIKEDELRGENRQILKDIMDDYYRGFISETLSSIDDIDWTSLFEK
MEIQLKNGDNKDTLIKEQTEYRKAIHKKFANDDRFKNMFSAKLISDILPEFVIHNNNYSASEKEEKTQVIKLFSRFATSFKDYF
KNRANCFSADDISSSSCHRIVNDNAEIFFSNALVYRRIVKSLSNDDINKISGDMKDSLKEMSLEEIYSYEKYGEFITQEGISFY
NDICGKVNSFMNLYCQKNKENKNLYKLQKLHKQILCIADTSYEVPYKFESDEEVYQSVNGELDNISSKHIVERLRKIGDNYNGY
NLDKIYIVSKFYESVSQKTYRDWETINTALEIHYNNILPGNGKSKADKVKKAVKNDLQKSITEINELVSNYKLCSDDNIKAETY
IHEISHILNNFEAQELKYNPEIHLVESELKASELKNVLDVIMNAFHWCSVFMTEELVDKDNNFYAELEEIYDEIYPVISLYNLV
RNYVTQKPYSTKKIKLNFGIPTLADGWSKSKEYSNNAIILMRDNLYYLGIFNAKNKPDKKIIEGNTSENKGDYKKMIYNLLPGP
NKMIPKVFLSSKTGVETYKPSAYILEGYKQNKHIKSSKDFDITFCHDLIDYFKNCIAIHPEWKNFGFDFSDTSTYEDISGFYRE
VELQGYKIDWTYISEKDIDLLQEKGQLYLFQIYNKDFSKKSTGNDNLHTMYLKNLFSEENLKDIVLKLNGEAEIFFRKSSIKNP
IIHKKGSILVNRTYEAEEKDQFGNIQIVRKNIPENIYQELYKYFNDKSDKELSDEAAKLKNVVGHHEAATNIVKDYRYTKDKYF
LHMPITINFKANKTGFINDRILQYIAKEKDLHVIGIDRGERNLIYVSVIDTCGNIVEQKSFNIVNGYDYQIKLKQQEGARQIAR
KEWKEIGKIKEIKEGYLSLVIHEISKMVIKYNAIIAMEDLSYGFKKGRFKVERQVYQKFETMLINKLNYLVFKDISITENGGLL
KGYQLTYIPDKLKNVGHQCGCIFYVPAAYTSKIDPTTGFVNIFKFKDLTVDAKREFIKKFDSIRYDSEKNLFCFTFDYNNFITQ
NTVMSKSSWSVYTYGVRIKRRFVNGRFSNESDTIDITKDMEKTLEMTDINWRDGHDLRQDIIDYEIVQHIFEIFRLTVQMRNSL
SELEDRDYDRLISPVLNENNIFYDSAKAGDALPKDADANGAYCIALKGLYEIKQITENWKEDGKFSRDKLKISNKDWFDFIQNK
RYL
ErCas12a-Y839L-NT (SEQ ID NO: 161)
atgAATAACGGTACCAATAACTTTCAAAATTTTATCGGGATCTCCTCGTTGCAAAAAACTCTTCGTAATGCTTTAATCCCGACT
GAGACAACACAGCAGTTCATCGTTAAAAACGGCATCATTAAAGAAGATGAGCTGCGCGGCGAGAACCGTCAGATTTTAAAGGAC
ATCATGGACGACTATTACCGTGGGTTCATCTCAGAAACATTAAGCAGCATCGATGATATCGACTGGACCTCACTGTTTGAGAAG
ATGGAGATTCAACTTAAGAATGGAGACAACAAAGACACTTTAATTAAGGAGCAGACGGAATATCGTAAAGCTATCCATAAAAAA
TTTGCAAACGATGACCGTTTCAAAAATATGTTTTCCGCAAAATTGATTAGCGACATTTTACCTGAATTCGTAATCCATAACAAC
AACTATTCCGCATCTGAAAAAGAGGAGAAGACCCAAGTTATCAAACTTTTTTCACGTTTCGCGACATCTTTTAAAGACTACTTT
AAGAATCGTGCGAATTGTTTCAGTGCAGATGATATTTCGTCTAGTTCATGTCACCGTATCGTGAATGACAACGCTGAGATTTTC
TTTTCTAATGCGTTGGTGTATCGCCGCATCGTAAAGTCCTTGTCGAATGATGATATCAACAAAATTAGTGGTGACATGAAAGAC
TCCCTGAAAGAAATGTCATTAGAGGAGATTTACAGCTACGAAAAATACGGAGAGTTCATCACTCAGGAAGGTATCTCCTTTTAC
AACGATATTTGCGGCAAAGTTAATAGTTTCATGAATCTGTATTGTCAGAAGAATAAGGAAAACAAGAATCTGTACAAGTTACAA
AAGCTTCATAAACAGATCTTGTGCATCGCCGACACGTCTTATGAAGTCCCGTATAAATTTGAAAGCGACGAAGAAGTATATCAG
AGTGTGAATGGATTCTTGGACAATATCTCATCAAAACACATTGTTGAACGTTTGCGCAAAATCGGCGACAACTATAACGGATAC
AACTTGGATAAAATTTATATCGTATCAAAATTTTATGAATCAGTATCCCAAAAGACTTACCGTGATTGGGAGACTATTAATACG
GCGTTAGAAATCCATTACAACAACATTCTGCCGGGTAACGGTAAATCGAAAGCGGACAAAGTGAAGAAGGCGGTTAAGAACGAT
CTTCAGAAGTCTATCACGGAGATTAATGAGCTGGTTTCCAATTACAAGTTGTGCTCGGATGATAACATCAAAGCTGAAACCTAT
ATCCATGAAATTTCTCATATTCTTAATAACTTCGAGGCACAAGAATTAAAATATAACCCAGAAATTCATCTGGTTGAGAGCGAA
CTTAAAGCTTCAGAATTAAAAAATGTTTTGGACGTAATTATGAACGCCTTCCATTGGTGCAGCGTGTTTATGACAGAGGAGTTA
GTAGATAAGGATAACAACTTTTATGCAGAATTGGAAGAGATCTATGATGAGATCTATCCAGTGATTTCACTGTATAACTTAGTC
CGTAATTACGTCACTCAGAAGCCGTACTCAACTAAAAAGATCAAGTTAAATTTTGGAATTCCGACATTGGCGGATGGTTGGAGT
AAGTCTAAGGAATACTCAAATAACGCTATTATCTTAATGCGTGACAACCTGTATTACTTGGGTATTTTCAATGCCAAAAATAAG
CCCGATAAAAAAATCATTGAAGGGAATACTTCAGAAAATAAGGGAGATTACAAAAAAATGATTTATAACCTTTTGCCAGGCCCA
AACAAAATGATCCCCAAGGTGTTTTTGAGTAGTAAGACGGGAGTAGAAACATATAAGCCATCAGCGTACATTCTTGAAGGGTAC
AAACAAAATAAACACATCAAGAGCAGCAAGGACTTTGACATTACATTTTGTCATGACTTAATCGACTACTTTAAAAATTGCATT
GCCATTCACCCTGAGTGGAAAAATTTTGGTTTCGACTTCAGTGATACCTCTACCTATGAAGATATCTCTGGTTTTTATCGTGAG
GTAGAACTTCAGGGTTACAAGATCGATTGGACGTACATTTCCGAGAAAGACATTGATCTTTTACAAGAGAAGGGTCAGCTTTAC
TTATTTCAGATCTACAATAAAGACTTTTCGAAAAAATCCACGGGCAACGACAACCTTCATACAATGTACTTAAAGAACCTGTTC
TCTGAAGAAAACTTGAAAGATATCGTGCTTAAATTGAATGGCGAGGCCGAGATTTTTTTCCGTAAAAGCTCGATTAAGAATCCC
ATCATCCACAAGAAAGGCAGCATTCTGGTAAATCGTACCTATGAAGCGGAGGAAAAGGACCAATTTGGTAATATTCAGATTGTC
CGTAAGAACATCCCTGAAAATATCTATCAAGAATTATATAAATATTTCAACGATAAGTCGGACAAGGAACTTAGCGATGAAGCC
GCGAAGTTGAAAAATGTTGTTGGTCACCACGAAGCAGCAACAAACATTGTGAAAGACTATCGCTACACTTACGATAAGCTGTTT
TTACATATGCCTATTACGATTAACTTTAAGGCAAATAAGACAGGTTTTATCAACGACCGTATCCTGCAATATATTGCAAAAGAG
AAGGACCTGCATGTCATTGGGATTGATCGCGGTGAACGCAATCTGATTTACGTGAGTGTTATTGATACCTGCGGTAATATTGTT
GAGCAAAAGTCTTTTAATATCGTTAATGGTTACGACTACCAAATTAAGCTTAAACAACAGGAAGGTGCCCGCCAGATCGCCCGT
AAGGAGTGGAAGGAAATCGGAAAAATTAAGGAAATCAAAGAGGGATATCTGAGCTTGGTTATTCATGAAATCTCAAAGATGGTT
ATTAAGTACAACGCCATCATCGCTATGGAAGACTTATCGTATGGGTTTAAAAAGGGTCGTTTCAAAGTTGAGCGCCAGGTCTAC
CAAAAGTTTGAAACGATGCTTATTAATAAATTAAACTACTTGGTTTTCAAAGATATCTCTATTACCGAGAATGGAGGTTTACTG
AAAGGATACCAGTTAACGTATATCCCCGATAAGCTTAAAAACGTGGGCCATCAGTGTGGCTGTATTTTCTATGTGCCCGCGGCA
TATACATCAAAAATTGACCCGACGACGGGTTTCGTTAATATCTTCAAGTTCAAAGATCTGACAGTTGATGCAAAACGCGAATTC
ATTAAGAAGTTCGATAGTATTCGCTATGACTCCGAGAAAAATTTGTTTTGCTTCACTTTTGACTACAATAACTTTATTACTCAG
AATACAGTCATGAGTAAAAGCTCCTGGTCGGTTTACACGTACGGGGTACGCATCAAACGTCGTTTTGTGAATGGTCGTTTTAGT
AATGAGTCGGATACAATTGATATTACCAAGGATATGGAGAAGACTCTGGAAATGACAGACATCAATTGGCGTGATGGACATGAT
TTGCGTCAGGACATTATCGACTATGAGATTGTGCAGCATATTTTCGAAATTTTTCGCCTGACGGTGCAAATGCGTAATTCCTTA
AGCGAACTGGAAGATCGCGACTATGACCGCTTAATTTCTCCTGTGCTGAATGAGAACAACATCTTCTATGACTCAGCGAAAGCC
GGGGACGCTTTGCCAAAGGATGCAGATGCTAACGGTGCATATTGTATTGCTCTGAAAGGCCTTTACGAGATCAAACAAATTACT
GAAAACTGGAAGGAAGATGGAAAGTTTTCCCGTGATAAATTGAAGATCTCTAATAAGGACTGGTTTGACTTTATCCAAAATAAA
CGTTATTTA
ErCas12a-Y839L-AA (SEQ ID NO: 162)
MNNGTNNFQNFIGISSLQKTLRNALIPTETTQQFIVKNGIIKEDELRGENRQILKDIMDDYYRGFISETLSSIDDIDWTSLFEK
MEIQLKNGDNKDTLIKEQTEYRKAIHKKFANDDRFKNMFSAKLISDILPEFVIHNNNYSASEKEEKTQVIKLFSRFATSFKDYF
KNRANCFSADDISSSSCHRIVNDNAEIFFSNALVYRRIVKSLSNDDINKISGDMKDSLKEMSLEEIYSYEKYGEFITQEGISFY
NDICGKVNSFMNLYCQKNKENKNLYKLQKLHKQILCIADTSYEVPYKFESDEEVYQSVNGELDNISSKHIVERLRKIGDNYNGY
NLDKIYIVSKFYESVSQKTYRDWETINTALEIHYNNILPGNGKSKADKVKKAVKNDLQKSITEINELVSNYKLCSDDNIKAETY
IHEISHILNNFEAQELKYNPEIHLVESELKASELKNVLDVIMNAFHWCSVFMTEELVDKDNNFYAELEEIYDEIYPVISLYNLV
RNYVTQKPYSTKKIKLNFGIPTLADGWSKSKEYSNNAIILMRDNLYYLGIFNAKNKPDKKIIEGNTSENKGDYKKMIYNLLPGP
NKMIPKVFLSSKTGVETYKPSAYILEGYKQNKHIKSSKDFDITFCHDLIDYFKNCIAIHPEWKNFGFDFSDTSTYEDISGFYRE
VELQGYKIDWTYISEKDIDLLQEKGQLYLFQIYNKDFSKKSTGNDNLHTMYLKNLFSEENLKDIVLKLNGEAEIFFRKSSIKNP
IIHKKGSILVNRTYEAEEKDQFGNIQIVRKNIPENIYQELYKYFNDKSDKELSDEAAKLKNVVGHHEAATNIVKDYRYTYDKLF
LHMPITINFKANKTGFINDRILQYIAKEKDLHVIGIDRGERNLIYVSVIDTCGNIVEQKSFNIVNGYDYQIKLKQQEGARQIAR
KEWKEIGKIKEIKEGYLSLVIHEISKMVIKYNAIIAMEDLSYGFKKGRFKVERQVYQKFETMLINKLNYLVFKDISITENGGLL
KGYQLTYIPDKLKNVGHQCGCIFYVPAAYTSKIDPTTGFVNIFKFKDLTVDAKREFIKKFDSIRYDSEKNLFCFTFDYNNFITQ
NTVMSKSSWSVYTYGVRIKRRFVNGRFSNESDTIDITKDMEKTLEMTDINWRDGHDLRQDIIDYEIVQHIFEIFRLTVQMRNSL
SELEDRDYDRLISPVLNENNIFYDSAKAGDALPKDADANGAYCIALKGLYEIKQITENWKEDGKFSRDKLKISNKDWEDFIQNK
RYL
ErCas12a-F840L-NT (SEQ ID NO: 163)
atgAATAACGGTACCAATAACTTTCAAAATTTTATCGGGATCTCCTCGTTGCAAAAAACTCTTCGTAATGCTTTAATCCCGACT
GAGACAACACAGCAGTTCATCGTTAAAAACGGCATCATTAAAGAAGATGAGCTGCGCGGCGAGAACCGTCAGATTTTAAAGGAC
ATCATGGACGACTATTACCGTGGGTTCATCTCAGAAACATTAAGCAGCATCGATGATATCGACTGGACCTCACTGTTTGAGAAG
ATGGAGATTCAACTTAAGAATGGAGACAACAAAGACACTTTAATTAAGGAGCAGACGGAATATCGTAAAGCTATCCATAAAAAA
TTTGCAAACGATGACCGTTTCAAAAATATGTTTTCCGCAAAATTGATTAGCGACATTTTACCTGAATTCGTAATCCATAACAAC
AACTATTCCGCATCTGAAAAAGAGGAGAAGACCCAAGTTATCAAACTTTTTTCACGTTTCGCGACATCTTTTAAAGACTACTTT
AAGAATCGTGCGAATTGTTTCAGTGCAGATGATATTTCGTCTAGTTCATGTCACCGTATCGTGAATGACAACGCTGAGATTTTC
TTTTCTAATGCGTTGGTGTATCGCCGCATCGTAAAGTCCTTGTCGAATGATGATATCAACAAAATTAGTGGTGACATGAAAGAC
TCCCTGAAAGAAATGTCATTAGAGGAGATTTACAGCTACGAAAAATACGGAGAGTTCATCACTCAGGAAGGTATCTCCTTTTAC
AACGATATTTGCGGCAAAGTTAATAGTTTCATGAATCTGTATTGTCAGAAGAATAAGGAAAACAAGAATCTGTACAAGTTACAA
AAGCTTCATAAACAGATCTTGTGCATCGCCGACACGTCTTATGAAGTCCCGTATAAATTTGAAAGCGACGAAGAAGTATATCAG
AGTGTGAATGGATTCTTGGACAATATCTCATCAAAACACATTGTTGAACGTTTGCGCAAAATCGGCGACAACTATAACGGATAC
AACTTGGATAAAATTTATATCGTATCAAAATTTTATGAATCAGTATCCCAAAAGACTTACCGTGATTGGGAGACTATTAATACG
GCGTTAGAAATCCATTACAACAACATTCTGCCGGGTAACGGTAAATCGAAAGCGGACAAAGTGAAGAAGGCGGTTAAGAACGAT
CTTCAGAAGTCTATCACGGAGATTAATGAGCTGGTTTCCAATTACAAGTTGTGCTCGGATGATAACATCAAAGCTGAAACCTAT
ATCCATGAAATTTCTCATATTCTTAATAACTTCGAGGCACAAGAATTAAAATATAACCCAGAAATTCATCTGGTTGAGAGCGAA
CTTAAAGCTTCAGAATTAAAAAATGTTTTGGACGTAATTATGAACGCCTTCCATTGGTGCAGCGTGTTTATGACAGAGGAGTTA
GTAGATAAGGATAACAACTTTTATGCAGAATTGGAAGAGATCTATGATGAGATCTATCCAGTGATTTCACTGTATAACTTAGTC
CGTAATTACGTCACTCAGAAGCCGTACTCAACTAAAAAGATCAAGTTAAATTTTGGAATTCCGACATTGGCGGATGGTTGGAGT
AAGTCTAAGGAATACTCAAATAACGCTATTATCTTAATGCGTGACAACCTGTATTACTTGGGTATTTTCAATGCCAAAAATAAG
CCCGATAAAAAAATCATTGAAGGGAATACTTCAGAAAATAAGGGAGATTACAAAAAAATGATTTATAACCTTTTGCCAGGCCCA
AACAAAATGATCCCCAAGGTGTTTTTGAGTAGTAAGACGGGAGTAGAAACATATAAGCCATCAGCGTACATTCTTGAAGGGTAC
AAACAAAATAAACACATCAAGAGCAGCAAGGACTTTGACATTACATTTTGTCATGACTTAATCGACTACTTTAAAAATTGCATT
GCCATTCACCCTGAGTGGAAAAATTTTGGTTTCGACTTCAGTGATACCTCTACCTATGAAGATATCTCTGGTTTTTATCGTGAG
GTAGAACTTCAGGGTTACAAGATCGATTGGACGTACATTTCCGAGAAAGACATTGATCTTTTACAAGAGAAGGGTCAGCTTTAC
TTATTTCAGATCTACAATAAAGACTTTTCGAAAAAATCCACGGGCAACGACAACCTTCATACAATGTACTTAAAGAACCTGTTC
TCTGAAGAAAACTTGAAAGATATCGTGCTTAAATTGAATGGCGAGGCCGAGATTTTTTTCCGTAAAAGCTCGATTAAGAATCCC
ATCATCCACAAGAAAGGCAGCATTCTGGTAAATCGTACCTATGAAGCGGAGGAAAAGGACCAATTTGGTAATATTCAGATTGTC
CGTAAGAACATCCCTGAAAATATCTATCAAGAATTATATAAATATTTCAACGATAAGTCGGACAAGGAACTTAGCGATGAAGCC
GCGAAGTTGAAAAATGTTGTTGGTCACCACGAAGCAGCAACAAACATTGTGAAAGACTATCGCTACACTTACGATAAGTACCTG
TTACATATGCCTATTACGATTAACTTTAAGGCAAATAAGACAGGTTTTATCAACGACCGTATCCTGCAATATATTGCAAAAGAG
AAGGACCTGCATGTCATTGGGATTGATCGCGGTGAACGCAATCTGATTTACGTGAGTGTTATTGATACCTGCGGTAATATTGTT
GAGCAAAAGTCTTTTAATATCGTTAATGGTTACGACTACCAAATTAAGCTTAAACAACAGGAAGGTGCCCGCCAGATCGCCCGT
AAGGAGTGGAAGGAAATCGGAAAAATTAAGGAAATCAAAGAGGGATATCTGAGCTTGGTTATTCATGAAATCTCAAAGATGGTT
ATTAAGTACAACGCCATCATCGCTATGGAAGACTTATCGTATGGGTTTAAAAAGGGTCGTTTCAAAGTTGAGCGCCAGGTCTAC
CAAAAGTTTGAAACGATGCTTATTAATAAATTAAACTACTTGGTTTTCAAAGATATCTCTATTACCGAGAATGGAGGTTTACTG
AAAGGATACCAGTTAACGTATATCCCCGATAAGCTTAAAAACGTGGGCCATCAGTGTGGCTGTATTTTCTATGTGCCCGCGGCA
TATACATCAAAAATTGACCCGACGACGGGTTTCGTTAATATCTTCAAGTTCAAAGATCTGACAGTTGATGCAAAACGCGAATTC
ATTAAGAAGTTCGATAGTATTCGCTATGACTCCGAGAAAAATTTGTTTTGCTTCACTTTTGACTACAATAACTTTATTACTCAG
AATACAGTCATGAGTAAAAGCTCCTGGTCGGTTTACACGTACGGGGTACGCATCAAACGTCGTTTTGTGAATGGTCGTTTTAGT
AATGAGTCGGATACAATTGATATTACCAAGGATATGGAGAAGACTCTGGAAATGACAGACATCAATTGGCGTGATGGACATGAT
TTGCGTCAGGACATTATCGACTATGAGATTGTGCAGCATATTTTCGAAATTTTTCGCCTGACGGTGCAAATGCGTAATTCCTTA
AGCGAACTGGAAGATCGCGACTATGACCGCTTAATTTCTCCTGTGCTGAATGAGAACAACATCTTCTATGACTCAGCGAAAGCC
GGGGACGCTTTGCCAAAGGATGCAGATGCTAACGGTGCATATTGTATTGCTCTGAAAGGCCTTTACGAGATCAAACAAATTACT
GAAAACTGGAAGGAAGATGGAAAGTTTTCCCGTGATAAATTGAAGATCTCTAATAAGGACTGGTTTGACTTTATCCAAAATAAA
CGTTATTTA
ErCas12a-F840L-AA (SEQ ID NO: 164)
MNNGTNNFQNFIGISSLQKTLRNALIPTETTQQFIVKNGIIKEDELRGENRQILKDIMDDYYRGFISETLSSIDDIDWTSLFEK
MEIQLKNGDNKDTLIKEQTEYRKAIHKKFANDDRFKNMFSAKLISDILPEFVIHNNNYSASEKEEKTQVIKLFSRFATSFKDYF
KNRANCESADDISSSSCHRIVNDNAEIFFSNALVYRRIVKSLSNDDINKISGDMKDSLKEMSLEEIYSYEKYGEFITQEGISFY
NDICGKVNSFMNLYCQKNKENKNLYKLQKLHKQILCIADTSYEVPYKFESDEEVYQSVNGFLDNISSKHIVERLRKIGDNYNGY
NLDKIYIVSKFYESVSQKTYRDWETINTALEIHYNNILPGNGKSKADKVKKAVKNDLQKSITEINELVSNYKLCSDDNIKAETY
IHEISHILNNFEAQELKYNPEIHLVESELKASELKNVLDVIMNAFHWCSVFMTEELVDKDNNFYAELEEIYDEIYPVISLYNLV
RNYVTQKPYSTKKIKLNFGIPTLADGWSKSKEYSNNAIILMRDNLYYLGIFNAKNKPDKKIIEGNTSENKGDYKKMIYNLLPGP
NKMIPKVFLSSKTGVETYKPSAYILEGYKQNKHIKSSKDFDITFCHDLIDYFKNCIAIHPEWKNFGFDFSDTSTYEDISGFYRE
VELQGYKIDWTYISEKDIDLLQEKGQLYLFQIYNKDFSKKSTGNDNLHTMYLKNLFSEENLKDIVLKLNGEAEIFFRKSSIKNP
IIHKKGSILVNRTYEAEEKDQFGNIQIVRKNIPENIYQELYKYFNDKSDKELSDEAAKLKNVVGHHEAATNIVKDYRYTYDKYL
LHMPITINFKANKTGFINDRILQYIAKEKDLHVIGIDRGERNLIYVSVIDTCGNIVEQKSFNIVNGYDYQIKLKQQEGARQIAR
KEWKEIGKIKEIKEGYLSLVIHEISKMVIKYNAIIAMEDLSYGFKKGRFKVERQVYQKFETMLINKLNYLVFKDISITENGGLL
KGYQLTYIPDKLKNVGHQCGCIFYVPAAYTSKIDPTTGFVNIFKFKDLTVDAKREFIKKFDSIRYDSEKNLFCFTFDYNNFITQ
NTVMSKSSWSVYTYGVRIKRRFVNGRFSNESDTIDITKDMEKTLEMTDINWRDGHDLRQDIIDYEIVQHIFEIFRLTVQMRNSL
SELEDRDYDRLISPVLNENNIFYDSAKAGDALPKDADANGAYCIALKGLYEIKQITENWKEDGKFSRDKLKISNKDWFDFIQNK
RYL
ErCas12a-Y907V-NT (SEQ ID NO: 165)
atgAATAACGGTACCAATAACTTTCAAAATTTTATCGGGATCTCCTCGTTGCAAAAAACTCTTCGTAATGCTTTAATCCCGACT
GAGACAACACAGCAGTTCATCGTTAAAAACGGCATCATTAAAGAAGATGAGCTGCGCGGCGAGAACCGTCAGATTTTAAAGGAC
ATCATGGACGACTATTACCGTGGGTTCATCTCAGAAACATTAAGCAGCATCGATGATATCGACTGGACCTCACTGTTTGAGAAG
ATGGAGATTCAACTTAAGAATGGAGACAACAAAGACACTTTAATTAAGGAGCAGACGGAATATCGTAAAGCTATCCATAAAAAA
TTTGCAAACGATGACCGTTTCAAAAATATGTTTTCCGCAAAATTGATTAGCGACATTTTACCTGAATTCGTAATCCATAACAAC
AACTATTCCGCATCTGAAAAAGAGGAGAAGACCCAAGTTATCAAACTTTTTTCACGTTTCGCGACATCTTTTAAAGACTACTTT
AAGAATCGTGCGAATTGTTTCAGTGCAGATGATATTTCGTCTAGTTCATGTCACCGTATCGTGAATGACAACGCTGAGATTTTC
TTTTCTAATGCGTTGGTGTATCGCCGCATCGTAAAGTCCTTGTCGAATGATGATATCAACAAAATTAGTGGTGACATGAAAGAC
TCCCTGAAAGAAATGTCATTAGAGGAGATTTACAGCTACGAAAAATACGGAGAGTTCATCACTCAGGAAGGTATCTCCTTTTAC
AACGATATTTGCGGCAAAGTTAATAGTTTCATGAATCTGTATTGTCAGAAGAATAAGGAAAACAAGAATCTGTACAAGTTACAA
AAGCTTCATAAACAGATCTTGTGCATCGCCGACACGTCTTATGAAGTCCCGTATAAATTTGAAAGCGACGAAGAAGTATATCAG
AGTGTGAATGGATTCTTGGACAATATCTCATCAAAACACATTGTTGAACGTTTGCGCAAAATCGGCGACAACTATAACGGATAC
AACTTGGATAAAATTTATATCGTATCAAAATTTTATGAATCAGTATCCCAAAAGACTTACCGTGATTGGGAGACTATTAATACG
GCGTTAGAAATCCATTACAACAACATTCTGCCGGGTAACGGTAAATCGAAAGCGGACAAAGTGAAGAAGGCGGTTAAGAACGAT
CTTCAGAAGTCTATCACGGAGATTAATGAGCTGGTTTCCAATTACAAGTTGTGCTCGGATGATAACATCAAAGCTGAAACCTAT
ATCCATGAAATTTCTCATATTCTTAATAACTTCGAGGCACAAGAATTAAAATATAACCCAGAAATTCATCTGGTTGAGAGCGAA
CTTAAAGCTTCAGAATTAAAAAATGTTTTGGACGTAATTATGAACGCCTTCCATTGGTGCAGCGTGTTTATGACAGAGGAGTTA
GTAGATAAGGATAACAACTTTTATGCAGAATTGGAAGAGATCTATGATGAGATCTATCCAGTGATTTCACTGTATAACTTAGTC
CGTAATTACGTCACTCAGAAGCCGTACTCAACTAAAAAGATCAAGTTAAATTTTGGAATTCCGACATTGGCGGATGGTTGGAGT
AAGTCTAAGGAATACTCAAATAACGCTATTATCTTAATGCGTGACAACCTGTATTACTTGGGTATTTTCAATGCCAAAAATAAG
CCCGATAAAAAAATCATTGAAGGGAATACTTCAGAAAATAAGGGAGATTACAAAAAAATGATTTATAACCTTTTGCCAGGCCCA
AACAAAATGATCCCCAAGGTGTTTTTGAGTAGTAAGACGGGAGTAGAAACATATAAGCCATCAGCGTACATTCTTGAAGGGTAC
AAACAAAATAAACACATCAAGAGCAGCAAGGACTTTGACATTACATTTTGTCATGACTTAATCGACTACTTTAAAAATTGCATT
GCCATTCACCCTGAGTGGAAAAATTTTGGTTTCGACTTCAGTGATACCTCTACCTATGAAGATATCTCTGGTTTTTATCGTGAG
GTAGAACTTCAGGGTTACAAGATCGATTGGACGTACATTTCCGAGAAAGACATTGATCTTTTACAAGAGAAGGGTCAGCTTTAC
TTATTTCAGATCTACAATAAAGACTTTTCGAAAAAATCCACGGGCAACGACAACCTTCATACAATGTACTTAAAGAACCTGTTC
TCTGAAGAAAACTTGAAAGATATCGTGCTTAAATTGAATGGCGAGGCCGAGATTTTTTTCCGTAAAAGCTCGATTAAGAATCCC
ATCATCCACAAGAAAGGCAGCATTCTGGTAAATCGTACCTATGAAGCGGAGGAAAAGGACCAATTTGGTAATATTCAGATTGTC
CGTAAGAACATCCCTGAAAATATCTATCAAGAATTATATAAATATTTCAACGATAAGTCGGACAAGGAACTTAGCGATGAAGCC
GCGAAGTTGAAAAATGTTGTTGGTCACCACGAAGCAGCAACAAACATTGTGAAAGACTATCGCTACACTTACGATAAGTACTTT
TTACATATGCCTATTACGATTAACTTTAAGGCAAATAAGACAGGTTTTATCAACGACCGTATCCTGCAATATATTGCAAAAGAG
AAGGACCTGCATGTCATTGGGATTGATCGCGGTGAACGCAATCTGATTTACGTGAGTGTTATTGATACCTGCGGTAATATTGTT
GAGCAAAAGTCTTTTAATATCGTTAATGGTGTGGACTACCAAATTAAGCTTAAACAACAGGAAGGTGCCCGCCAGATCGCCCGT
AAGGAGTGGAAGGAAATCGGAAAAATTAAGGAAATCAAAGAGGGATATCTGAGCTTGGTTATTCATGAAATCTCAAAGATGGTT
ATTAAGTACAACGCCATCATCGCTATGGAAGACTTATCGTATGGGTTTAAAAAGGGTCGTTTCAAAGTTGAGCGCCAGGTCTAC
CAAAAGTTTGAAACGATGCTTATTAATAAATTAAACTACTTGGTTTTCAAAGATATCTCTATTACCGAGAATGGAGGTTTACTG
AAAGGATACCAGTTAACGTATATCCCCGATAAGCTTAAAAACGTGGGCCATCAGTGTGGCTGTATTTTCTATGTGCCCGCGGCA
TATACATCAAAAATTGACCCGACGACGGGTTTCGTTAATATCTTCAAGTTCAAAGATCTGACAGTTGATGCAAAACGCGAATTC
ATTAAGAAGTTCGATAGTATTCGCTATGACTCCGAGAAAAATTTGTTTTGCTTCACTTTTGACTACAATAACTTTATTACTCAG
AATACAGTCATGAGTAAAAGCTCCTGGTCGGTTTACACGTACGGGGTACGCATCAAACGTCGTTTTGTGAATGGTCGTTTTAGT
AATGAGTCGGATACAATTGATATTACCAAGGATATGGAGAAGACTCTGGAAATGACAGACATCAATTGGCGTGATGGACATGAT
TTGCGTCAGGACATTATCGACTATGAGATTGTGCAGCATATTTTCGAAATTTTTCGCCTGACGGTGCAAATGCGTAATTCCTTA
AGCGAACTGGAAGATCGCGACTATGACCGCTTAATTTCTCCTGTGCTGAATGAGAACAACATCTTCTATGACTCAGCGAAAGCC
GGGGACGCTTTGCCAAAGGATGCAGATGCTAACGGTGCATATTGTATTGCTCTGAAAGGCCTTTACGAGATCAAACAAATTACT
GAAAACTGGAAGGAAGATGGAAAGTTTTCCCGTGATAAATTGAAGATCTCTAATAAGGACTGGTTTGACTTTATCCAAAATAAA
CGTTATTTA
ErCas12a-Y907V-AA (SEQ ID NO: 166)
MNNGTNNFQNFIGISSLQKTLRNALIPTETTQQFIVKNGIIKEDELRGENRQILKDIMDDYYRGFISETLSSIDDIDWTSLFEK
MEIQLKNGDNKDTLIKEQTEYRKAIHKKFANDDRFKNMFSAKLISDILPEFVIHNNNYSASEKEEKTQVIKLFSRFATSFKDYF
KNRANCFSADDISSSSCHRIVNDNAEIFFSNALVYRRIVKSLSNDDINKISGDMKDSLKEMSLEEIYSYEKYGEFITQEGISFY
NDICGKVNSFMNLYCQKNKENKNLYKLQKLHKQILCIADTSYEVPYKFESDEEVYQSVNGELDNISSKHIVERLRKIGDNYNGY
NLDKIYIVSKFYESVSQKTYRDWETINTALEIHYNNILPGNGKSKADKVKKAVKNDLQKSITEINELVSNYKLCSDDNIKAETY
IHEISHILNNFEAQELKYNPEIHLVESELKASELKNVLDVIMNAFHWCSVFMTEELVDKDNNFYAELEEIYDEIYPVISLYNLV
RNYVTQKPYSTKKIKLNFGIPTLADGWSKSKEYSNNAIILMRDNLYYLGIFNAKNKPDKKIIEGNTSENKGDYKKMIYNLLPGP
NKMIPKVFLSSKTGVETYKPSAYILEGYKQNKHIKSSKDFDITFCHDLIDYFKNCIAIHPEWKNFGFDFSDTSTYEDISGFYRE
VELQGYKIDWTYISEKDIDLLQEKGQLYLFQIYNKDFSKKSTGNDNLHTMYLKNLFSEENLKDIVLKLNGEAEIFFRKSSIKNP
IIHKKGSILVNRTYEAEEKDQFGNIQIVRKNIPENIYQELYKYFNDKSDKELSDEAAKLKNVVGHHEAATNIVKDYRYTYDKYF
LHMPITINFKANKTGFINDRILQYIAKEKDLHVIGIDRGERNLIYVSVIDTCGNIVEQKSFNIVNGVDYQIKLKQQEGARQIAR
KEWKEIGKIKEIKEGYLSLVIHEISKMVIKYNAIIAMEDLSYGFKKGRFKVERQVYQKFETMLINKLNYLVFKDISITENGGLL
KGYQLTYIPDKLKNVGHQCGCIFYVPAAYTSKIDPTTGFVNIFKFKDLTVDAKREFIKKFDSIRYDSEKNLFCFTFDYNNFITQ
NTVMSKSSWSVYTYGVRIKRRFVNGRFSNESDTIDITKDMEKTLEMTDINWRDGHDLRQDIIDYEIVQHIFEIFRLTVQMRNSL
SELEDRDYDRLISPVLNENNIFYDSAKAGDALPKDADANGAYCIALKGLYEIKQITENWKEDGKFSRDKLKISNKDWFDFIQNK
RYL
ErCas12a-Y907I-NT (SEQ ID NO: 167)
atgAATAACGGTACCAATAACTTTCAAAATTTTATCGGGATCTCCTCGTTGCAAAAAACTCTTCGTAATGCTTTAATCCCGACT
GAGACAACACAGCAGTTCATCGTTAAAAACGGCATCATTAAAGAAGATGAGCTGCGCGGCGAGAACCGTCAGATTTTAAAGGAC
ATCATGGACGACTATTACCGTGGGTTCATCTCAGAAACATTAAGCAGCATCGATGATATCGACTGGACCTCACTGTTTGAGAAG
ATGGAGATTCAACTTAAGAATGGAGACAACAAAGACACTTTAATTAAGGAGCAGACGGAATATCGTAAAGCTATCCATAAAAAA
TTTGCAAACGATGACCGTTTCAAAAATATGTTTTCCGCAAAATTGATTAGCGACATTTTACCTGAATTCGTAATCCATAACAAC
AACTATTCCGCATCTGAAAAAGAGGAGAAGACCCAAGTTATCAAACTTTTTTCACGTTTCGCGACATCTTTTAAAGACTACTTT
AAGAATCGTGCGAATTGTTTCAGTGCAGATGATATTTCGTCTAGTTCATGTCACCGTATCGTGAATGACAACGCTGAGATTTTC
TTTTCTAATGCGTTGGTGTATCGCCGCATCGTAAAGTCCTTGTCGAATGATGATATCAACAAAATTAGTGGTGACATGAAAGAC
TCCCTGAAAGAAATGTCATTAGAGGAGATTTACAGCTACGAAAAATACGGAGAGTTCATCACTCAGGAAGGTATCTCCTTTTAC
AACGATATTTGCGGCAAAGTTAATAGTTTCATGAATCTGTATTGTCAGAAGAATAAGGAAAACAAGAATCTGTACAAGTTACAA
AAGCTTCATAAACAGATCTTGTGCATCGCCGACACGTCTTATGAAGTCCCGTATAAATTTGAAAGCGACGAAGAAGTATATCAG
AGTGTGAATGGATTCTTGGACAATATCTCATCAAAACACATTGTTGAACGTTTGCGCAAAATCGGCGACAACTATAACGGATAC
AACTTGGATAAAATTTATATCGTATCAAAATTTTATGAATCAGTATCCCAAAAGACTTACCGTGATTGGGAGACTATTAATACG
GCGTTAGAAATCCATTACAACAACATTCTGCCGGGTAACGGTAAATCGAAAGCGGACAAAGTGAAGAAGGCGGTTAAGAACGAT
CTTCAGAAGTCTATCACGGAGATTAATGAGCTGGTTTCCAATTACAAGTTGTGCTCGGATGATAACATCAAAGCTGAAACCTAT
ATCCATGAAATTTCTCATATTCTTAATAACTTCGAGGCACAAGAATTAAAATATAACCCAGAAATTCATCTGGTTGAGAGCGAA
CTTAAAGCTTCAGAATTAAAAAATGTTTTGGACGTAATTATGAACGCCTTCCATTGGTGCAGCGTGTTTATGACAGAGGAGTTA
GTAGATAAGGATAACAACTTTTATGCAGAATTGGAAGAGATCTATGATGAGATCTATCCAGTGATTTCACTGTATAACTTAGTC
CGTAATTACGTCACTCAGAAGCCGTACTCAACTAAAAAGATCAAGTTAAATTTTGGAATTCCGACATTGGCGGATGGTTGGAGT
AAGTCTAAGGAATACTCAAATAACGCTATTATCTTAATGCGTGACAACCTGTATTACTTGGGTATTTTCAATGCCAAAAATAAG
CCCGATAAAAAAATCATTGAAGGGAATACTTCAGAAAATAAGGGAGATTACAAAAAAATGATTTATAACCTTTTGCCAGGCCCA
AACAAAATGATCCCCAAGGTGTTTTTGAGTAGTAAGACGGGAGTAGAAACATATAAGCCATCAGCGTACATTCTTGAAGGGTAC
AAACAAAATAAACACATCAAGAGCAGCAAGGACTTTGACATTACATTTTGTCATGACTTAATCGACTACTTTAAAAATTGCATT
GCCATTCACCCTGAGTGGAAAAATTTTGGTTTCGACTTCAGTGATACCTCTACCTATGAAGATATCTCTGGTTTTTATCGTGAG
GTAGAACTTCAGGGTTACAAGATCGATTGGACGTACATTTCCGAGAAAGACATTGATCTTTTACAAGAGAAGGGTCAGCTTTAC
TTATTTCAGATCTACAATAAAGACTTTTCGAAAAAATCCACGGGCAACGACAACCTTCATACAATGTACTTAAAGAACCTGTTC
TCTGAAGAAAACTTGAAAGATATCGTGCTTAAATTGAATGGCGAGGCCGAGATTTTTTTCCGTAAAAGCTCGATTAAGAATCCC
ATCATCCACAAGAAAGGCAGCATTCTGGTAAATCGTACCTATGAAGCGGAGGAAAAGGACCAATTTGGTAATATTCAGATTGTC
CGTAAGAACATCCCTGAAAATATCTATCAAGAATTATATAAATATTTCAACGATAAGTCGGACAAGGAACTTAGCGATGAAGCC
GCGAAGTTGAAAAATGTTGTTGGTCACCACGAAGCAGCAACAAACATTGTGAAAGACTATCGCTACACTTACGATAAGTACTTT
TTACATATGCCTATTACGATTAACTTTAAGGCAAATAAGACAGGTTTTATCAACGACCGTATCCTGCAATATATTGCAAAAGAG
AAGGACCTGCATGTCATTGGGATTGATCGCGGTGAACGCAATCTGATTTACGTGAGTGTTATTGATACCTGCGGTAATATTGTT
GAGCAAAAGTCTTTTAATATCGTTAATGGTATTGACTACCAAATTAAGCTTAAACAACAGGAAGGTGCCCGCCAGATCGCCCGT
AAGGAGTGGAAGGAAATCGGAAAAATTAAGGAAATCAAAGAGGGATATCTGAGCTTGGTTATTCATGAAATCTCAAAGATGGTT
ATTAAGTACAACGCCATCATCGCTATGGAAGACTTATCGTATGGGTTTAAAAAGGGTCGTTTCAAAGTTGAGCGCCAGGTCTAC
CAAAAGTTTGAAACGATGCTTATTAATAAATTAAACTACTTGGTTTTCAAAGATATCTCTATTACCGAGAATGGAGGTTTACTG
AAAGGATACCAGTTAACGTATATCCCCGATAAGCTTAAAAACGTGGGCCATCAGTGTGGCTGTATTTTCTATGTGCCCGCGGCA
TATACATCAAAAATTGACCCGACGACGGGTTTCGTTAATATCTTCAAGTTCAAAGATCTGACAGTTGATGCAAAACGCGAATTC
ATTAAGAAGTTCGATAGTATTCGCTATGACTCCGAGAAAAATTTGTTTTGCTTCACTTTTGACTACAATAACTTTATTACTCAG
AATACAGTCATGAGTAAAAGCTCCTGGTCGGTTTACACGTACGGGGTACGCATCAAACGTCGTTTTGTGAATGGTCGTTTTAGT
AATGAGTCGGATACAATTGATATTACCAAGGATATGGAGAAGACTCTGGAAATGACAGACATCAATTGGCGTGATGGACATGAT
TTGCGTCAGGACATTATCGACTATGAGATTGTGCAGCATATTTTCGAAATTTTTCGCCTGACGGTGCAAATGCGTAATTCCTTA
AGCGAACTGGAAGATCGCGACTATGACCGCTTAATTTCTCCTGTGCTGAATGAGAACAACATCTTCTATGACTCAGCGAAAGCC
GGGGACGCTTTGCCAAAGGATGCAGATGCTAACGGTGCATATTGTATTGCTCTGAAAGGCCTTTACGAGATCAAACAAATTACT
GAAAACTGGAAGGAAGATGGAAAGTTTTCCCGTGATAAATTGAAGATCTCTAATAAGGACTGGTTTGACTTTATCCAAAATAAA
CGTTATTTA
ErCas12a-Y907I-AA (SEQ ID NO: 168)
MNNGTNNFQNFIGISSLQKTLRNALIPTETTQQFIVKNGIIKEDELRGENRQILKDIMDDYYRGFISETLSSIDDIDWTSLFEK
MEIQLKNGDNKDTLIKEQTEYRKAIHKKFANDDRFKNMFSAKLISDILPEFVIHNNNYSASEKEEKTQVIKLFSRFATSFKDYF
KNRANCFSADDISSSSCHRIVNDNAEIFFSNALVYRRIVKSLSNDDINKISGDMKDSLKEMSLEEIYSYEKYGEFITQEGISFY
NDICGKVNSFMNLYCQKNKENKNLYKLQKLHKQILCIADTSYEVPYKFESDEEVYQSVNGELDNISSKHIVERLRKIGDNYNGY
NLDKIYIVSKFYESVSQKTYRDWETINTALEIHYNNILPGNGKSKADKVKKAVKNDLQKSITEINELVSNYKLCSDDNIKAETY
IHEISHILNNFEAQELKYNPEIHLVESELKASELKNVLDVIMNAFHWCSVFMTEELVDKDNNFYAELEEIYDEIYPVISLYNLV
RNYVTQKPYSTKKIKLNFGIPTLADGWSKSKEYSNNAIILMRDNLYYLGIFNAKNKPDKKIIEGNTSENKGDYKKMIYNLLPGP
NKMIPKVFLSSKTGVETYKPSAYILEGYKQNKHIKSSKDFDITFCHDLIDYFKNCIAIHPEWKNFGFDFSDTSTYEDISGFYRE
VELQGYKIDWTYISEKDIDLLQEKGQLYLFQIYNKDFSKKSTGNDNLHTMYLKNLFSEENLKDIVLKLNGEAEIFFRKSSIKNP
IIHKKGSILVNRTYEAEEKDQFGNIQIVRKNIPENIYQELYKYFNDKSDKELSDEAAKLKNVVGHHEAATNIVKDYRYTYDKYF
LHMPITINFKANKTGFINDRILQYIAKEKDLHVIGIDRGERNLIYVSVIDTCGNIVEQKSFNIVNGIDYQIKLKQQEGARQIAR
KEWKEIGKIKEIKEGYLSLVIHEISKMVIKYNAIIAMEDLSYGFKKGRFKVERQVYQKFETMLINKLNYLVFKDISITENGGLL
KGYQLTYIPDKLKNVGHQCGCIFYVPAAYTSKIDPTTGFVNIFKFKDLTVDAKREFIKKFDSIRYDSEKNLFCFTFDYNNFITQ
NTVMSKSSWSVYTYGVRIKRRFVNGRFSNESDTIDITKDMEKTLEMTDINWRDGHDLRQDIIDYEIVQHIFEIFRLTVQMRNSL
SELEDRDYDRLISPVLNENNIFYDSAKAGDALPKDADANGAYCIALKGLYEIKQITENWKEDGKFSRDKLKISNKDWEDFIQNK
RYL
ErCas12a-Q916Y-NT (SEQ ID NO: 169)
atgAATAACGGTACCAATAACTTTCAAAATTTTATCGGGATCTCCTCGTTGCAAAAAACTCTTCGTAATGCTTTAATCCCGACT
GAGACAACACAGCAGTTCATCGTTAAAAACGGCATCATTAAAGAAGATGAGCTGCGCGGCGAGAACCGTCAGATTTTAAAGGAC
ATCATGGACGACTATTACCGTGGGTTCATCTCAGAAACATTAAGCAGCATCGATGATATCGACTGGACCTCACTGTTTGAGAAG
ATGGAGATTCAACTTAAGAATGGAGACAACAAAGACACTTTAATTAAGGAGCAGACGGAATATCGTAAAGCTATCCATAAAAAA
TTTGCAAACGATGACCGTTTCAAAAATATGTTTTCCGCAAAATTGATTAGCGACATTTTACCTGAATTCGTAATCCATAACAAC
AACTATTCCGCATCTGAAAAAGAGGAGAAGACCCAAGTTATCAAACTTTTTTCACGTTTCGCGACATCTTTTAAAGACTACTTT
AAGAATCGTGCGAATTGTTTCAGTGCAGATGATATTTCGTCTAGTTCATGTCACCGTATCGTGAATGACAACGCTGAGATTTTC
TTTTCTAATGCGTTGGTGTATCGCCGCATCGTAAAGTCCTTGTCGAATGATGATATCAACAAAATTAGTGGTGACATGAAAGAC
TCCCTGAAAGAAATGTCATTAGAGGAGATTTACAGCTACGAAAAATACGGAGAGTTCATCACTCAGGAAGGTATCTCCTTTTAC
AACGATATTTGCGGCAAAGTTAATAGTTTCATGAATCTGTATTGTCAGAAGAATAAGGAAAACAAGAATCTGTACAAGTTACAA
AAGCTTCATAAACAGATCTTGTGCATCGCCGACACGTCTTATGAAGTCCCGTATAAATTTGAAAGCGACGAAGAAGTATATCAG
AGTGTGAATGGATTCTTGGACAATATCTCATCAAAACACATTGTTGAACGTTTGCGCAAAATCGGCGACAACTATAACGGATAC
AACTTGGATAAAATTTATATCGTATCAAAATTTTATGAATCAGTATCCCAAAAGACTTACCGTGATTGGGAGACTATTAATACG
GCGTTAGAAATCCATTACAACAACATTCTGCCGGGTAACGGTAAATCGAAAGCGGACAAAGTGAAGAAGGCGGTTAAGAACGAT
CTTCAGAAGTCTATCACGGAGATTAATGAGCTGGTTTCCAATTACAAGTTGTGCTCGGATGATAACATCAAAGCTGAAACCTAT
ATCCATGAAATTTCTCATATTCTTAATAACTTCGAGGCACAAGAATTAAAATATAACCCAGAAATTCATCTGGTTGAGAGCGAA
CTTAAAGCTTCAGAATTAAAAAATGTTTTGGACGTAATTATGAACGCCTTCCATTGGTGCAGCGTGTTTATGACAGAGGAGTTA
GTAGATAAGGATAACAACTTTTATGCAGAATTGGAAGAGATCTATGATGAGATCTATCCAGTGATTTCACTGTATAACTTAGTC
CGTAATTACGTCACTCAGAAGCCGTACTCAACTAAAAAGATCAAGTTAAATTTTGGAATTCCGACATTGGCGGATGGTTGGAGT
AAGTCTAAGGAATACTCAAATAACGCTATTATCTTAATGCGTGACAACCTGTATTACTTGGGTATTTTCAATGCCAAAAATAAG
CCCGATAAAAAAATCATTGAAGGGAATACTTCAGAAAATAAGGGAGATTACAAAAAAATGATTTATAACCTTTTGCCAGGCCCA
AACAAAATGATCCCCAAGGTGTTTTTGAGTAGTAAGACGGGAGTAGAAACATATAAGCCATCAGCGTACATTCTTGAAGGGTAC
AAACAAAATAAACACATCAAGAGCAGCAAGGACTTTGACATTACATTTTGTCATGACTTAATCGACTACTTTAAAAATTGCATT
GCCATTCACCCTGAGTGGAAAAATTTTGGTTTCGACTTCAGTGATACCTCTACCTATGAAGATATCTCTGGTTTTTATCGTGAG
GTAGAACTTCAGGGTTACAAGATCGATTGGACGTACATTTCCGAGAAAGACATTGATCTTTTACAAGAGAAGGGTCAGCTTTAC
TTATTTCAGATCTACAATAAAGACTTTTCGAAAAAATCCACGGGCAACGACAACCTTCATACAATGTACTTAAAGAACCTGTTC
TCTGAAGAAAACTTGAAAGATATCGTGCTTAAATTGAATGGCGAGGCCGAGATTTTTTTCCGTAAAAGCTCGATTAAGAATCCC
ATCATCCACAAGAAAGGCAGCATTCTGGTAAATCGTACCTATGAAGCGGAGGAAAAGGACCAATTTGGTAATATTCAGATTGTC
CGTAAGAACATCCCTGAAAATATCTATCAAGAATTATATAAATATTTCAACGATAAGTCGGACAAGGAACTTAGCGATGAAGCC
GCGAAGTTGAAAAATGTTGTTGGTCACCACGAAGCAGCAACAAACATTGTGAAAGACTATCGCTACACTTACGATAAGTACTTT
TTACATATGCCTATTACGATTAACTTTAAGGCAAATAAGACAGGTTTTATCAACGACCGTATCCTGCAATATATTGCAAAAGAG
AAGGACCTGCATGTCATTGGGATTGATCGCGGTGAACGCAATCTGATTTACGTGAGTGTTATTGATACCTGCGGTAATATTGTT
GAGCAAAAGTCTTTTAATATCGTTAATGGTTACGACTACCAAATTAAGCTTAAACAATATGAAGGTGCCCGCCAGATCGCCCGT
AAGGAGTGGAAGGAAATCGGAAAAATTAAGGAAATCAAAGAGGGATATCTGAGCTTGGTTATTCATGAAATCTCAAAGATGGTT
ATTAAGTACAACGCCATCATCGCTATGGAAGACTTATCGTATGGGTTTAAAAAGGGTCGTTTCAAAGTTGAGCGCCAGGTCTAC
CAAAAGTTTGAAACGATGCTTATTAATAAATTAAACTACTTGGTTTTCAAAGATATCTCTATTACCGAGAATGGAGGTTTACTG
AAAGGATACCAGTTAACGTATATCCCCGATAAGCTTAAAAACGTGGGCCATCAGTGTGGCTGTATTTTCTATGTGCCCGCGGCA
TATACATCAAAAATTGACCCGACGACGGGTTTCGTTAATATCTTCAAGTTCAAAGATCTGACAGTTGATGCAAAACGCGAATTC
ATTAAGAAGTTCGATAGTATTCGCTATGACTCCGAGAAAAATTTGTTTTGCTTCACTTTTGACTACAATAACTTTATTACTCAG
AATACAGTCATGAGTAAAAGCTCCTGGTCGGTTTACACGTACGGGGTACGCATCAAACGTCGTTTTGTGAATGGTCGTTTTAGT
AATGAGTCGGATACAATTGATATTACCAAGGATATGGAGAAGACTCTGGAAATGACAGACATCAATTGGCGTGATGGACATGAT
TTGCGTCAGGACATTATCGACTATGAGATTGTGCAGCATATTTTCGAAATTTTTCGCCTGACGGTGCAAATGCGTAATTCCTTA
AGCGAACTGGAAGATCGCGACTATGACCGCTTAATTTCTCCTGTGCTGAATGAGAACAACATCTTCTATGACTCAGCGAAAGCC
GGGGACGCTTTGCCAAAGGATGCAGATGCTAACGGTGCATATTGTATTGCTCTGAAAGGCCTTTACGAGATCAAACAAATTACT
GAAAACTGGAAGGAAGATGGAAAGTTTTCCCGTGATAAATTGAAGATCTCTAATAAGGACTGGTTTGACTTTATCCAAAATAAA
CGTTATTTA
ErCas12a-Q916Y-AA (SEQ ID NO: 170)
MNNGTNNFQNFIGISSLQKTLRNALIPTETTQQFIVKNGIIKEDELRGENRQILKDIMDDYYRGFISETLSSIDDIDWTSLFEK
MEIQLKNGDNKDTLIKEQTEYRKAIHKKFANDDRFKNMFSAKLISDILPEFVIHNNNYSASEKEEKTQVIKLESRFATSFKDYF
KNRANCESADDISSSSCHRIVNDNAEIFFSNALVYRRIVKSLSNDDINKISGDMKDSLKEMSLEEIYSYEKYGEFITQEGISFY
NDICGKVNSFMNLYCQKNKENKNLYKLQKLHKQILCIADTSYEVPYKFESDEEVYQSVNGFLDNISSKHIVERLRKIGDNYNGY
NLDKIYIVSKFYESVSQKTYRDWETINTALEIHYNNILPGNGKSKADKVKKAVKNDLQKSITEINELVSNYKLCSDDNIKAETY
IHEISHILNNFEAQELKYNPEIHLVESELKASELKNVLDVIMNAFHWCSVFMTEELVDKDNNFYAELEEIYDEIYPVISLYNLV
RNYVTQKPYSTKKIKLNFGIPTLADGWSKSKEYSNNAIILMRDNLYYLGIFNAKNKPDKKIIEGNTSENKGDYKKMIYNLLPGP
NKMIPKVFLSSKTGVETYKPSAYILEGYKQNKHIKSSKDFDITFCHDLIDYFKNCIAIHPEWKNFGFDFSDTSTYEDISGFYRE
VELQGYKIDWTYISEKDIDLLQEKGQLYLFQIYNKDFSKKSTGNDNLHTMYLKNLFSEENLKDIVLKLNGEAEIFFRKSSIKNP
IIHKKGSILVNRTYEAEEKDQFGNIQIVRKNIPENIYQELYKYFNDKSDKELSDEAAKLKNVVGHHEAATNIVKDYRYTYDKYF
LHMPITINFKANKTGFINDRILQYIAKEKDLHVIGIDRGERNLIYVSVIDTCGNIVEQKSFNIVNGYDYQIKLKQYEGARQIAR
KEWKEIGKIKEIKEGYLSLVIHEISKMVIKYNAIIAMEDLSYGFKKGRFKVERQVYQKFETMLINKLNYLVFKDISITENGGLL
KGYQLTYIPDKLKNVGHQCGCIFYVPAAYTSKIDPTTGFVNIFKFKDLTVDAKREFIKKFDSIRYDSEKNLFCFTFDYNNFITQ
NTVMSKSSWSVYTYGVRIKRRFVNGRFSNESDTIDITKDMEKTLEMTDINWRDGHDLRQDIIDYEIVQHIFEIFRLTVQMRNSL
SELEDRDYDRLISPVLNENNIFYDSAKAGDALPKDADANGAYCIALKGLYEIKQITENWKEDGKFSRDKLKISNKDWFDFIQNK
RYL
ErCas12a-E935R-NT (SEQ ID NO: 171)
atgAATAACGGTACCAATAACTTTCAAAATTTTATCGGGATCTCCTCGTTGCAAAAAACTCTTCGTAATGCTTTAATCCCGACT
GAGACAACACAGCAGTTCATCGTTAAAAACGGCATCATTAAAGAAGATGAGCTGCGCGGCGAGAACCGTCAGATTTTAAAGGAC
ATCATGGACGACTATTACCGTGGGTTCATCTCAGAAACATTAAGCAGCATCGATGATATCGACTGGACCTCACTGTTTGAGAAG
ATGGAGATTCAACTTAAGAATGGAGACAACAAAGACACTTTAATTAAGGAGCAGACGGAATATCGTAAAGCTATCCATAAAAAA
TTTGCAAACGATGACCGTTTCAAAAATATGTTTTCCGCAAAATTGATTAGCGACATTTTACCTGAATTCGTAATCCATAACAAC
AACTATTCCGCATCTGAAAAAGAGGAGAAGACCCAAGTTATCAAACTTTTTTCACGTTTCGCGACATCTTTTAAAGACTACTTT
AAGAATCGTGCGAATTGTTTCAGTGCAGATGATATTTCGTCTAGTTCATGTCACCGTATCGTGAATGACAACGCTGAGATTTTC
TTTTCTAATGCGTTGGTGTATCGCCGCATCGTAAAGTCCTTGTCGAATGATGATATCAACAAAATTAGTGGTGACATGAAAGAC
TCCCTGAAAGAAATGTCATTAGAGGAGATTTACAGCTACGAAAAATACGGAGAGTTCATCACTCAGGAAGGTATCTCCTTTTAC
AACGATATTTGCGGCAAAGTTAATAGTTTCATGAATCTGTATTGTCAGAAGAATAAGGAAAACAAGAATCTGTACAAGTTACAA
AAGCTTCATAAACAGATCTTGTGCATCGCCGACACGTCTTATGAAGTCCCGTATAAATTTGAAAGCGACGAAGAAGTATATCAG
AGTGTGAATGGATTCTTGGACAATATCTCATCAAAACACATTGTTGAACGTTTGCGCAAAATCGGCGACAACTATAACGGATAC
AACTTGGATAAAATTTATATCGTATCAAAATTTTATGAATCAGTATCCCAAAAGACTTACCGTGATTGGGAGACTATTAATACG
GCGTTAGAAATCCATTACAACAACATTCTGCCGGGTAACGGTAAATCGAAAGCGGACAAAGTGAAGAAGGCGGTTAAGAACGAT
CTTCAGAAGTCTATCACGGAGATTAATGAGCTGGTTTCCAATTACAAGTTGTGCTCGGATGATAACATCAAAGCTGAAACCTAT
ATCCATGAAATTTCTCATATTCTTAATAACTTCGAGGCACAAGAATTAAAATATAACCCAGAAATTCATCTGGTTGAGAGCGAA
CTTAAAGCTTCAGAATTAAAAAATGTTTTGGACGTAATTATGAACGCCTTCCATTGGTGCAGCGTGTTTATGACAGAGGAGTTA
GTAGATAAGGATAACAACTTTTATGCAGAATTGGAAGAGATCTATGATGAGATCTATCCAGTGATTTCACTGTATAACTTAGTC
CGTAATTACGTCACTCAGAAGCCGTACTCAACTAAAAAGATCAAGTTAAATTTTGGAATTCCGACATTGGCGGATGGTTGGAGT
AAGTCTAAGGAATACTCAAATAACGCTATTATCTTAATGCGTGACAACCTGTATTACTTGGGTATTTTCAATGCCAAAAATAAG
CCCGATAAAAAAATCATTGAAGGGAATACTTCAGAAAATAAGGGAGATTACAAAAAAATGATTTATAACCTTTTGCCAGGCCCA
AACAAAATGATCCCCAAGGTGTTTTTGAGTAGTAAGACGGGAGTAGAAACATATAAGCCATCAGCGTACATTCTTGAAGGGTAC
AAACAAAATAAACACATCAAGAGCAGCAAGGACTTTGACATTACATTTTGTCATGACTTAATCGACTACTTTAAAAATTGCATT
GCCATTCACCCTGAGTGGAAAAATTTTGGTTTCGACTTCAGTGATACCTCTACCTATGAAGATATCTCTGGTTTTTATCGTGAG
GTAGAACTTCAGGGTTACAAGATCGATTGGACGTACATTTCCGAGAAAGACATTGATCTTTTACAAGAGAAGGGTCAGCTTTAC
TTATTTCAGATCTACAATAAAGACTTTTCGAAAAAATCCACGGGCAACGACAACCTTCATACAATGTACTTAAAGAACCTGTTC
TCTGAAGAAAACTTGAAAGATATCGTGCTTAAATTGAATGGCGAGGCCGAGATTTTTTTCCGTAAAAGCTCGATTAAGAATCCC
ATCATCCACAAGAAAGGCAGCATTCTGGTAAATCGTACCTATGAAGCGGAGGAAAAGGACCAATTTGGTAATATTCAGATTGTC
CGTAAGAACATCCCTGAAAATATCTATCAAGAATTATATAAATATTTCAACGATAAGTCGGACAAGGAACTTAGCGATGAAGCC
GCGAAGTTGAAAAATGTTGTTGGTCACCACGAAGCAGCAACAAACATTGTGAAAGACTATCGCTACACTTACGATAAGTACTTT
TTACATATGCCTATTACGATTAACTTTAAGGCAAATAAGACAGGTTTTATCAACGACCGTATCCTGCAATATATTGCAAAAGAG
AAGGACCTGCATGTCATTGGGATTGATCGCGGTGAACGCAATCTGATTTACGTGAGTGTTATTGATACCTGCGGTAATATTGTT
GAGCAAAAGTCTTTTAATATCGTTAATGGTTACGACTACCAAATTAAGCTTAAACAACAGGAAGGTGCCCGCCAGATCGCCCGT
AAGGAGTGGAAGGAAATCGGAAAAATTAAGCGTATCAAAGAGGGATATCTGAGCTTGGTTATTCATGAAATCTCAAAGATGGTT
ATTAAGTACAACGCCATCATCGCTATGGAAGACTTATCGTATGGGTTTAAAAAGGGTCGTTTCAAAGTTGAGCGCCAGGTCTAC
CAAAAGTTTGAAACGATGCTTATTAATAAATTAAACTACTTGGTTTTCAAAGATATCTCTATTACCGAGAATGGAGGTTTACTG
AAAGGATACCAGTTAACGTATATCCCCGATAAGCTTAAAAACGTGGGCCATCAGTGTGGCTGTATTTTCTATGTGCCCGCGGCA
TATACATCAAAAATTGACCCGACGACGGGTTTCGTTAATATCTTCAAGTTCAAAGATCTGACAGTTGATGCAAAACGCGAATTC
ATTAAGAAGTTCGATAGTATTCGCTATGACTCCGAGAAAAATTTGTTTTGCTTCACTTTTGACTACAATAACTTTATTACTCAG
AATACAGTCATGAGTAAAAGCTCCTGGTCGGTTTACACGTACGGGGTACGCATCAAACGTCGTTTTGTGAATGGTCGTTTTAGT
AATGAGTCGGATACAATTGATATTACCAAGGATATGGAGAAGACTCTGGAAATGACAGACATCAATTGGCGTGATGGACATGAT
TTGCGTCAGGACATTATCGACTATGAGATTGTGCAGCATATTTTCGAAATTTTTCGCCTGACGGTGCAAATGCGTAATTCCTTA
AGCGAACTGGAAGATCGCGACTATGACCGCTTAATTTCTCCTGTGCTGAATGAGAACAACATCTTCTATGACTCAGCGAAAGCC
GGGGACGCTTTGCCAAAGGATGCAGATGCTAACGGTGCATATTGTATTGCTCTGAAAGGCCTTTACGAGATCAAACAAATTACT
GAAAACTGGAAGGAAGATGGAAAGTTTTCCCGTGATAAATTGAAGATCTCTAATAAGGACTGGTTTGACTTTATCCAAAATAAA
CGTTATTTA
ErCas12a-E935R-AA (SEQ ID NO: 172)
MNNGTNNFQNFIGISSLQKTLRNALIPTETTQQFIVKNGIIKEDELRGENRQILKDIMDDYYRGFISETLSSIDDIDWTSLFEK
MEIQLKNGDNKDTLIKEQTEYRKAIHKKFANDDRFKNMFSAKLISDILPEFVIHNNNYSASEKEEKTQVIKLFSRFATSFKDYF
KNRANCESADDISSSSCHRIVNDNAEIFFSNALVYRRIVKSLSNDDINKISGDMKDSLKEMSLEEIYSYEKYGEFITQEGISFY
NDICGKVNSFMNLYCQKNKENKNLYKLQKLHKQILCIADTSYEVPYKFESDEEVYQSVNGELDNISSKHIVERLRKIGDNYNGY
NLDKIYIVSKFYESVSQKTYRDWETINTALEIHYNNILPGNGKSKADKVKKAVKNDLQKSITEINELVSNYKLCSDDNIKAETY
IHEISHILNNFEAQELKYNPEIHLVESELKASELKNVLDVIMNAFHWCSVFMTEELVDKDNNFYAELEEIYDEIYPVISLYNLV
RNYVTQKPYSTKKIKLNFGIPTLADGWSKSKEYSNNAIILMRDNLYYLGIFNAKNKPDKKIIEGNTSENKGDYKKMIYNLLPGP
NKMIPKVFLSSKTGVETYKPSAYILEGYKQNKHIKSSKDFDITFCHDLIDYFKNCIAIHPEWKNFGFDFSDTSTYEDISGFYRE
VELQGYKIDWTYISEKDIDLLQEKGQLYLFQIYNKDFSKKSTGNDNLHTMYLKNLFSEENLKDIVLKLNGEAEIFFRKSSIKNP
IIHKKGSILVNRTYEAEEKDQFGNIQIVRKNIPENIYQELYKYFNDKSDKELSDEAAKLKNVVGHHEAATNIVKDYRYTYDKYF
LHMPITINFKANKTGFINDRILQYIAKEKDLHVIGIDRGERNLIYVSVIDTCGNIVEQKSFNIVNGYDYQIKLKQQEGARQIAR
KEWKEIGKIKRIKEGYLSLVIHEISKMVIKYNAIIAMEDLSYGFKKGRFKVERQVYQKFETMLINKLNYLVFKDISITENGGLL
KGYQLTYIPDKLKNVGHQCGCIFYVPAAYTSKIDPTTGFVNIFKFKDLTVDAKREFIKKFDSIRYDSEKNLFCFTFDYNNFITQ
NTVMSKSSWSVYTYGVRIKRRFVNGRFSNESDTIDITKDMEKTLEMTDINWRDGHDLRQDIIDYEIVQHIFEIFRLTVQMRNSL
SELEDRDYDRLISPVLNENNIFYDSAKAGDALPKDADANGAYCIALKGLYEIKQITENWKEDGKFSRDKLKISNKDWFDFIQNK
RYL
ErCas12a-I936R-NT (SEQ ID NO: 173)
atgAATAACGGTACCAATAACTTTCAAAATTTTATCGGGATCTCCTCGTTGCAAAAAACTCTTCGTAATGCTTTAATCCCGACT
GAGACAACACAGCAGTTCATCGTTAAAAACGGCATCATTAAAGAAGATGAGCTGCGCGGCGAGAACCGTCAGATTTTAAAGGAC
ATCATGGACGACTATTACCGTGGGTTCATCTCAGAAACATTAAGCAGCATCGATGATATCGACTGGACCTCACTGTTTGAGAAG
ATGGAGATTCAACTTAAGAATGGAGACAACAAAGACACTTTAATTAAGGAGCAGACGGAATATCGTAAAGCTATCCATAAAAAA
TTTGCAAACGATGACCGTTTCAAAAATATGTTTTCCGCAAAATTGATTAGCGACATTTTACCTGAATTCGTAATCCATAACAAC
AACTATTCCGCATCTGAAAAAGAGGAGAAGACCCAAGTTATCAAACTTTTTTCACGTTTCGCGACATCTTTTAAAGACTACTTT
AAGAATCGTGCGAATTGTTTCAGTGCAGATGATATTTCGTCTAGTTCATGTCACCGTATCGTGAATGACAACGCTGAGATTTTC
TTTTCTAATGCGTTGGTGTATCGCCGCATCGTAAAGTCCTTGTCGAATGATGATATCAACAAAATTAGTGGTGACATGAAAGAC
TCCCTGAAAGAAATGTCATTAGAGGAGATTTACAGCTACGAAAAATACGGAGAGTTCATCACTCAGGAAGGTATCTCCTTTTAC
AACGATATTTGCGGCAAAGTTAATAGTTTCATGAATCTGTATTGTCAGAAGAATAAGGAAAACAAGAATCTGTACAAGTTACAA
AAGCTTCATAAACAGATCTTGTGCATCGCCGACACGTCTTATGAAGTCCCGTATAAATTTGAAAGCGACGAAGAAGTATATCAG
AGTGTGAATGGATTCTTGGACAATATCTCATCAAAACACATTGTTGAACGTTTGCGCAAAATCGGCGACAACTATAACGGATAC
AACTTGGATAAAATTTATATCGTATCAAAATTTTATGAATCAGTATCCCAAAAGACTTACCGTGATTGGGAGACTATTAATACG
GCGTTAGAAATCCATTACAACAACATTCTGCCGGGTAACGGTAAATCGAAAGCGGACAAAGTGAAGAAGGCGGTTAAGAACGAT
CTTCAGAAGTCTATCACGGAGATTAATGAGCTGGTTTCCAATTACAAGTTGTGCTCGGATGATAACATCAAAGCTGAAACCTAT
ATCCATGAAATTTCTCATATTCTTAATAACTTCGAGGCACAAGAATTAAAATATAACCCAGAAATTCATCTGGTTGAGAGCGAA
CTTAAAGCTTCAGAATTAAAAAATGTTTTGGACGTAATTATGAACGCCTTCCATTGGTGCAGCGTGTTTATGACAGAGGAGTTA
GTAGATAAGGATAACAACTTTTATGCAGAATTGGAAGAGATCTATGATGAGATCTATCCAGTGATTTCACTGTATAACTTAGTC
CGTAATTACGTCACTCAGAAGCCGTACTCAACTAAAAAGATCAAGTTAAATTTTGGAATTCCGACATTGGCGGATGGTTGGAGT
AAGTCTAAGGAATACTCAAATAACGCTATTATCTTAATGCGTGACAACCTGTATTACTTGGGTATTTTCAATGCCAAAAATAAG
CCCGATAAAAAAATCATTGAAGGGAATACTTCAGAAAATAAGGGAGATTACAAAAAAATGATTTATAACCTTTTGCCAGGCCCA
AACAAAATGATCCCCAAGGTGTTTTTGAGTAGTAAGACGGGAGTAGAAACATATAAGCCATCAGCGTACATTCTTGAAGGGTAC
AAACAAAATAAACACATCAAGAGCAGCAAGGACTTTGACATTACATTTTGTCATGACTTAATCGACTACTTTAAAAATTGCATT
GCCATTCACCCTGAGTGGAAAAATTTTGGTTTCGACTTCAGTGATACCTCTACCTATGAAGATATCTCTGGTTTTTATCGTGAG
GTAGAACTTCAGGGTTACAAGATCGATTGGACGTACATTTCCGAGAAAGACATTGATCTTTTACAAGAGAAGGGTCAGCTTTAC
TTATTTCAGATCTACAATAAAGACTTTTCGAAAAAATCCACGGGCAACGACAACCTTCATACAATGTACTTAAAGAACCTGTTC
TCTGAAGAAAACTTGAAAGATATCGTGCTTAAATTGAATGGCGAGGCCGAGATTTTTTTCCGTAAAAGCTCGATTAAGAATCCC
ATCATCCACAAGAAAGGCAGCATTCTGGTAAATCGTACCTATGAAGCGGAGGAAAAGGACCAATTTGGTAATATTCAGATTGTC
CGTAAGAACATCCCTGAAAATATCTATCAAGAATTATATAAATATTTCAACGATAAGTCGGACAAGGAACTTAGCGATGAAGCC
GCGAAGTTGAAAAATGTTGTTGGTCACCACGAAGCAGCAACAAACATTGTGAAAGACTATCGCTACACTTACGATAAGTACTTT
TTACATATGCCTATTACGATTAACTTTAAGGCAAATAAGACAGGTTTTATCAACGACCGTATCCTGCAATATATTGCAAAAGAG
AAGGACCTGCATGTCATTGGGATTGATCGCGGTGAACGCAATCTGATTTACGTGAGTGTTATTGATACCTGCGGTAATATTGTT
GAGCAAAAGTCTTTTAATATCGTTAATGGTTACGACTACCAAATTAAGCTTAAACAACAGGAAGGTGCCCGCCAGATCGCCCGT
AAGGAGTGGAAGGAAATCGGAAAAATTAAGGAACGTAAAGAGGGATATCTGAGCTTGGTTATTCATGAAATCTCAAAGATGGTT
ATTAAGTACAACGCCATCATCGCTATGGAAGACTTATCGTATGGGTTTAAAAAGGGTCGTTTCAAAGTTGAGCGCCAGGTCTAC
CAAAAGTTTGAAACGATGCTTATTAATAAATTAAACTACTTGGTTTTCAAAGATATCTCTATTACCGAGAATGGAGGTTTACTG
AAAGGATACCAGTTAACGTATATCCCCGATAAGCTTAAAAACGTGGGCCATCAGTGTGGCTGTATTTTCTATGTGCCCGCGGCA
TATACATCAAAAATTGACCCGACGACGGGTTTCGTTAATATCTTCAAGTTCAAAGATCTGACAGTTGATGCAAAACGCGAATTC
ATTAAGAAGTTCGATAGTATTCGCTATGACTCCGAGAAAAATTTGTTTTGCTTCACTTTTGACTACAATAACTTTATTACTCAG
AATACAGTCATGAGTAAAAGCTCCTGGTCGGTTTACACGTACGGGGTACGCATCAAACGTCGTTTTGTGAATGGTCGTTTTAGT
AATGAGTCGGATACAATTGATATTACCAAGGATATGGAGAAGACTCTGGAAATGACAGACATCAATTGGCGTGATGGACATGAT
TTGCGTCAGGACATTATCGACTATGAGATTGTGCAGCATATTTTCGAAATTTTTCGCCTGACGGTGCAAATGCGTAATTCCTTA
AGCGAACTGGAAGATCGCGACTATGACCGCTTAATTTCTCCTGTGCTGAATGAGAACAACATCTTCTATGACTCAGCGAAAGCC
GGGGACGCTTTGCCAAAGGATGCAGATGCTAACGGTGCATATTGTATTGCTCTGAAAGGCCTTTACGAGATCAAACAAATTACT
GAAAACTGGAAGGAAGATGGAAAGTTTTCCCGTGATAAATTGAAGATCTCTAATAAGGACTGGTTTGACTTTATCCAAAATAAA
CGTTATTTA
ErCas12a-I936R-AA (SEQ ID NO: 174)
MNNGTNNFQNFIGISSLQKTLRNALIPTETTQQFIVKNGIIKEDELRGENRQILKDIMDDYYRGFISETLSSIDDIDWTSLFEK
MEIQLKNGDNKDTLIKEQTEYRKAIHKKFANDDRFKNMFSAKLISDILPEFVIHNNNYSASEKEEKTQVIKLFSRFATSFKDYF
KNRANCFSADDISSSSCHRIVNDNAEIFFSNALVYRRIVKSLSNDDINKISGDMKDSLKEMSLEEIYSYEKYGEFITQEGISFY
NDICGKVNSFMNLYCQKNKENKNLYKLQKLHKQILCIADTSYEVPYKFESDEEVYQSVNGELDNISSKHIVERLRKIGDNYNGY
NLDKIYIVSKFYESVSQKTYRDWETINTALEIHYNNILPGNGKSKADKVKKAVKNDLQKSITEINELVSNYKLCSDDNIKAETY
IHEISHILNNFEAQELKYNPEIHLVESELKASELKNVLDVIMNAFHWCSVFMTEELVDKDNNFYAELEEIYDEIYPVISLYNLV
RNYVTQKPYSTKKIKLNFGIPTLADGWSKSKEYSNNAIILMRDNLYYLGIFNAKNKPDKKIIEGNTSENKGDYKKMIYNLLPGP
NKMIPKVFLSSKTGVETYKPSAYILEGYKQNKHIKSSKDFDITFCHDLIDYFKNCIAIHPEWKNFGFDFSDTSTYEDISGFYRE
VELQGYKIDWTYISEKDIDLLQEKGQLYLFQIYNKDFSKKSTGNDNLHTMYLKNLFSEENLKDIVLKLNGEAEIFFRKSSIKNP
IIHKKGSILVNRTYEAEEKDQFGNIQIVRKNIPENIYQELYKYFNDKSDKELSDEAAKLKNVVGHHEAATNIVKDYRYTYDKYF
LHMPITINFKANKTGFINDRILQYIAKEKDLHVIGIDRGERNLIYVSVIDTCGNIVEQKSFNIVNGYDYQIKLKQQEGARQIAR
KEWKEIGKIKERKEGYLSLVIHEISKMVIKYNAIIAMEDLSYGFKKGRFKVERQVYQKFETMLINKLNYLVFKDISITENGGLL
KGYQLTYIPDKLKNVGHQCGCIFYVPAAYTSKIDPTTGFVNIFKFKDLTVDAKREFIKKFDSIRYDSEKNLFCFTFDYNNFITQ
NTVMSKSSWSVYTYGVRIKRRFVNGRFSNESDTIDITKDMEKTLEMTDINWRDGHDLRQDIIDYEIVQHIFEIFRLTVQMRNSL
SELEDRDYDRLISPVLNENNIFYDSAKAGDALPKDADANGAYCIALKGLYEIKQITENWKEDGKFSRDKLKISNKDWFDFIQNK
RYL
ErCas12a-K974G-NT (SEQ ID NO: 175)
atgAATAACGGTACCAATAACTTTCAAAATTTTATCGGGATCTCCTCGTTGCAAAAAACTCTTCGTAATGCTTTAATCCCGACT
GAGACAACACAGCAGTTCATCGTTAAAAACGGCATCATTAAAGAAGATGAGCTGCGCGGCGAGAACCGTCAGATTTTAAAGGAC
ATCATGGACGACTATTACCGTGGGTTCATCTCAGAAACATTAAGCAGCATCGATGATATCGACTGGACCTCACTGTTTGAGAAG
ATGGAGATTCAACTTAAGAATGGAGACAACAAAGACACTTTAATTAAGGAGCAGACGGAATATCGTAAAGCTATCCATAAAAAA
TTTGCAAACGATGACCGTTTCAAAAATATGTTTTCCGCAAAATTGATTAGCGACATTTTACCTGAATTCGTAATCCATAACAAC
AACTATTCCGCATCTGAAAAAGAGGAGAAGACCCAAGTTATCAAACTTTTTTCACGTTTCGCGACATCTTTTAAAGACTACTTT
AAGAATCGTGCGAATTGTTTCAGTGCAGATGATATTTCGTCTAGTTCATGTCACCGTATCGTGAATGACAACGCTGAGATTTTC
TTTTCTAATGCGTTGGTGTATCGCCGCATCGTAAAGTCCTTGTCGAATGATGATATCAACAAAATTAGTGGTGACATGAAAGAC
TCCCTGAAAGAAATGTCATTAGAGGAGATTTACAGCTACGAAAAATACGGAGAGTTCATCACTCAGGAAGGTATCTCCTTTTAC
AACGATATTTGCGGCAAAGTTAATAGTTTCATGAATCTGTATTGTCAGAAGAATAAGGAAAACAAGAATCTGTACAAGTTACAA
AAGCTTCATAAACAGATCTTGTGCATCGCCGACACGTCTTATGAAGTCCCGTATAAATTTGAAAGCGACGAAGAAGTATATCAG
AGTGTGAATGGATTCTTGGACAATATCTCATCAAAACACATTGTTGAACGTTTGCGCAAAATCGGCGACAACTATAACGGATAC
AACTTGGATAAAATTTATATCGTATCAAAATTTTATGAATCAGTATCCCAAAAGACTTACCGTGATTGGGAGACTATTAATACG
GCGTTAGAAATCCATTACAACAACATTCTGCCGGGTAACGGTAAATCGAAAGCGGACAAAGTGAAGAAGGCGGTTAAGAACGAT
CTTCAGAAGTCTATCACGGAGATTAATGAGCTGGTTTCCAATTACAAGTTGTGCTCGGATGATAACATCAAAGCTGAAACCTAT
ATCCATGAAATTTCTCATATTCTTAATAACTTCGAGGCACAAGAATTAAAATATAACCCAGAAATTCATCTGGTTGAGAGCGAA
CTTAAAGCTTCAGAATTAAAAAATGTTTTGGACGTAATTATGAACGCCTTCCATTGGTGCAGCGTGTTTATGACAGAGGAGTTA
GTAGATAAGGATAACAACTTTTATGCAGAATTGGAAGAGATCTATGATGAGATCTATCCAGTGATTTCACTGTATAACTTAGTC
CGTAATTACGTCACTCAGAAGCCGTACTCAACTAAAAAGATCAAGTTAAATTTTGGAATTCCGACATTGGCGGATGGTTGGAGT
AAGTCTAAGGAATACTCAAATAACGCTATTATCTTAATGCGTGACAACCTGTATTACTTGGGTATTTTCAATGCCAAAAATAAG
CCCGATAAAAAAATCATTGAAGGGAATACTTCAGAAAATAAGGGAGATTACAAAAAAATGATTTATAACCTTTTGCCAGGCCCA
AACAAAATGATCCCCAAGGTGTTTTTGAGTAGTAAGACGGGAGTAGAAACATATAAGCCATCAGCGTACATTCTTGAAGGGTAC
AAACAAAATAAACACATCAAGAGCAGCAAGGACTTTGACATTACATTTTGTCATGACTTAATCGACTACTTTAAAAATTGCATT
GCCATTCACCCTGAGTGGAAAAATTTTGGTTTCGACTTCAGTGATACCTCTACCTATGAAGATATCTCTGGTTTTTATCGTGAG
GTAGAACTTCAGGGTTACAAGATCGATTGGACGTACATTTCCGAGAAAGACATTGATCTTTTACAAGAGAAGGGTCAGCTTTAC
TTATTTCAGATCTACAATAAAGACTTTTCGAAAAAATCCACGGGCAACGACAACCTTCATACAATGTACTTAAAGAACCTGTTC
TCTGAAGAAAACTTGAAAGATATCGTGCTTAAATTGAATGGCGAGGCCGAGATTTTTTTCCGTAAAAGCTCGATTAAGAATCCC
ATCATCCACAAGAAAGGCAGCATTCTGGTAAATCGTACCTATGAAGCGGAGGAAAAGGACCAATTTGGTAATATTCAGATTGTC
CGTAAGAACATCCCTGAAAATATCTATCAAGAATTATATAAATATTTCAACGATAAGTCGGACAAGGAACTTAGCGATGAAGCC
GCGAAGTTGAAAAATGTTGTTGGTCACCACGAAGCAGCAACAAACATTGTGAAAGACTATCGCTACACTTACGATAAGTACTTT
TTACATATGCCTATTACGATTAACTTTAAGGCAAATAAGACAGGTTTTATCAACGACCGTATCCTGCAATATATTGCAAAAGAG
AAGGACCTGCATGTCATTGGGATTGATCGCGGTGAACGCAATCTGATTTACGTGAGTGTTATTGATACCTGCGGTAATATTGTT
GAGCAAAAGTCTTTTAATATCGTTAATGGTTACGACTACCAAATTAAGCTTAAACAACAGGAAGGTGCCCGCCAGATCGCCCGT
AAGGAGTGGAAGGAAATCGGAAAAATTAAGGAAATCAAAGAGGGATATCTGAGCTTGGTTATTCATGAAATCTCAAAGATGGTT
ATTAAGTACAACGCCATCATCGCTATGGAAGACTTATCGTATGGGTTTAAAAAGGGTCGTTTCGGCGTTGAGCGCCAGGTCTAC
CAAAAGTTTGAAACGATGCTTATTAATAAATTAAACTACTTGGTTTTCAAAGATATCTCTATTACCGAGAATGGAGGTTTACTG
AAAGGATACCAGTTAACGTATATCCCCGATAAGCTTAAAAACGTGGGCCATCAGTGTGGCTGTATTTTCTATGTGCCCGCGGCA
TATACATCAAAAATTGACCCGACGACGGGTTTCGTTAATATCTTCAAGTTCAAAGATCTGACAGTTGATGCAAAACGCGAATTC
ATTAAGAAGTTCGATAGTATTCGCTATGACTCCGAGAAAAATTTGTTTTGCTTCACTTTTGACTACAATAACTTTATTACTCAG
AATACAGTCATGAGTAAAAGCTCCTGGTCGGTTTACACGTACGGGGTACGCATCAAACGTCGTTTTGTGAATGGTCGTTTTAGT
AATGAGTCGGATACAATTGATATTACCAAGGATATGGAGAAGACTCTGGAAATGACAGACATCAATTGGCGTGATGGACATGAT
TTGCGTCAGGACATTATCGACTATGAGATTGTGCAGCATATTTTCGAAATTTTTCGCCTGACGGTGCAAATGCGTAATTCCTTA
AGCGAACTGGAAGATCGCGACTATGACCGCTTAATTTCTCCTGTGCTGAATGAGAACAACATCTTCTATGACTCAGCGAAAGCC
GGGGACGCTTTGCCAAAGGATGCAGATGCTAACGGTGCATATTGTATTGCTCTGAAAGGCCTTTACGAGATCAAACAAATTACT
GAAAACTGGAAGGAAGATGGAAAGTTTTCCCGTGATAAATTGAAGATCTCTAATAAGGACTGGTTTGACTTTATCCAAAATAAA
CGTTATTTA
ErCas12a-K974G-AA (SEQ ID NO: 176)
MNNGTNNFQNFIGISSLQKTLRNALIPTETTQQFIVKNGIIKEDELRGENRQILKDIMDDYYRGFISETLSSIDDIDWTSLFEK
MEIQLKNGDNKDTLIKEQTEYRKAIHKKFANDDRFKNMFSAKLISDILPEFVIHNNNYSASEKEEKTQVIKLFSRFATSFKDYF
KNRANCFSADDISSSSCHRIVNDNAEIFFSNALVYRRIVKSLSNDDINKISGDMKDSLKEMSLEEIYSYEKYGEFITQEGISFY
NDICGKVNSFMNLYCQKNKENKNLYKLQKLHKQILCIADTSYEVPYKFESDEEVYQSVNGELDNISSKHIVERLRKIGDNYNGY
NLDKIYIVSKFYESVSQKTYRDWETINTALEIHYNNILPGNGKSKADKVKKAVKNDLQKSITEINELVSNYKLCSDDNIKAETY
IHEISHILNNFEAQELKYNPEIHLVESELKASELKNVLDVIMNAFHWCSVFMTEELVDKDNNFYAELEEIYDEIYPVISLYNLV
RNYVTQKPYSTKKIKLNFGIPTLADGWSKSKEYSNNAIILMRDNLYYLGIFNAKNKPDKKIIEGNTSENKGDYKKMIYNLLPGP
NKMIPKVFLSSKTGVETYKPSAYILEGYKQNKHIKSSKDFDITFCHDLIDYFKNCIAIHPEWKNFGFDFSDTSTYEDISGFYRE
VELQGYKIDWTYISEKDIDLLQEKGQLYLFQIYNKDFSKKSTGNDNLHTMYLKNLFSEENLKDIVLKLNGEAEIFFRKSSIKNP
IIHKKGSILVNRTYEAEEKDQFGNIQIVRKNIPENIYQELYKYFNDKSDKELSDEAAKLKNVVGHHEAATNIVKDYRYTYDKYF
LHMPITINFKANKTGFINDRILQYIAKEKDLHVIGIDRGERNLIYVSVIDTCGNIVEQKSFNIVNGYDYQIKLKQQEGARQIAR
KEWKEIGKIKEIKEGYLSLVIHEISKMVIKYNAIIAMEDLSYGFKKGRFGVERQVYQKFETMLINKLNYLVFKDISITENGGLL
KGYQLTYIPDKLKNVGHQCGCIFYVPAAYTSKIDPTTGFVNIFKFKDLTVDAKREFIKKFDSIRYDSEKNLFCFTFDYNNFITQ
NTVMSKSSWSVYTYGVRIKRRFVNGRFSNESDTIDITKDMEKTLEMTDINWRDGHDLRQDIIDYEIVQHIFEIFRLTVQMRNSL
SELEDRDYDRLISPVLNENNIFYDSAKAGDALPKDADANGAYCIALKGLYEIKQITENWKEDGKFSRDKLKISNKDWFDFIQNK
RYL
ErCas12a-K1019V-NT (SEQ ID NO: 177)
atgAATAACGGTACCAATAACTTTCAAAATTTTATCGGGATCTCCTCGTTGCAAAAAACTCTTCGTAATGCTTTAATCCCGACT
GAGACAACACAGCAGTTCATCGTTAAAAACGGCATCATTAAAGAAGATGAGCTGCGCGGCGAGAACCGTCAGATTTTAAAGGAC
ATCATGGACGACTATTACCGTGGGTTCATCTCAGAAACATTAAGCAGCATCGATGATATCGACTGGACCTCACTGTTTGAGAAG
ATGGAGATTCAACTTAAGAATGGAGACAACAAAGACACTTTAATTAAGGAGCAGACGGAATATCGTAAAGCTATCCATAAAAAA
TTTGCAAACGATGACCGTTTCAAAAATATGTTTTCCGCAAAATTGATTAGCGACATTTTACCTGAATTCGTAATCCATAACAAC
AACTATTCCGCATCTGAAAAAGAGGAGAAGACCCAAGTTATCAAACTTTTTTCACGTTTCGCGACATCTTTTAAAGACTACTTT
AAGAATCGTGCGAATTGTTTCAGTGCAGATGATATTTCGTCTAGTTCATGTCACCGTATCGTGAATGACAACGCTGAGATTTTC
TTTTCTAATGCGTTGGTGTATCGCCGCATCGTAAAGTCCTTGTCGAATGATGATATCAACAAAATTAGTGGTGACATGAAAGAC
TCCCTGAAAGAAATGTCATTAGAGGAGATTTACAGCTACGAAAAATACGGAGAGTTCATCACTCAGGAAGGTATCTCCTTTTAC
AACGATATTTGCGGCAAAGTTAATAGTTTCATGAATCTGTATTGTCAGAAGAATAAGGAAAACAAGAATCTGTACAAGTTACAA
AAGCTTCATAAACAGATCTTGTGCATCGCCGACACGTCTTATGAAGTCCCGTATAAATTTGAAAGCGACGAAGAAGTATATCAG
AGTGTGAATGGATTCTTGGACAATATCTCATCAAAACACATTGTTGAACGTTTGCGCAAAATCGGCGACAACTATAACGGATAC
AACTTGGATAAAATTTATATCGTATCAAAATTTTATGAATCAGTATCCCAAAAGACTTACCGTGATTGGGAGACTATTAATACG
GCGTTAGAAATCCATTACAACAACATTCTGCCGGGTAACGGTAAATCGAAAGCGGACAAAGTGAAGAAGGCGGTTAAGAACGAT
CTTCAGAAGTCTATCACGGAGATTAATGAGCTGGTTTCCAATTACAAGTTGTGCTCGGATGATAACATCAAAGCTGAAACCTAT
ATCCATGAAATTTCTCATATTCTTAATAACTTCGAGGCACAAGAATTAAAATATAACCCAGAAATTCATCTGGTTGAGAGCGAA
CTTAAAGCTTCAGAATTAAAAAATGTTTTGGACGTAATTATGAACGCCTTCCATTGGTGCAGCGTGTTTATGACAGAGGAGTTA
GTAGATAAGGATAACAACTTTTATGCAGAATTGGAAGAGATCTATGATGAGATCTATCCAGTGATTTCACTGTATAACTTAGTC
CGTAATTACGTCACTCAGAAGCCGTACTCAACTAAAAAGATCAAGTTAAATTTTGGAATTCCGACATTGGCGGATGGTTGGAGT
AAGTCTAAGGAATACTCAAATAACGCTATTATCTTAATGCGTGACAACCTGTATTACTTGGGTATTTTCAATGCCAAAAATAAG
CCCGATAAAAAAATCATTGAAGGGAATACTTCAGAAAATAAGGGAGATTACAAAAAAATGATTTATAACCTTTTGCCAGGCCCA
AACAAAATGATCCCCAAGGTGTTTTTGAGTAGTAAGACGGGAGTAGAAACATATAAGCCATCAGCGTACATTCTTGAAGGGTAC
AAACAAAATAAACACATCAAGAGCAGCAAGGACTTTGACATTACATTTTGTCATGACTTAATCGACTACTTTAAAAATTGCATT
GCCATTCACCCTGAGTGGAAAAATTTTGGTTTCGACTTCAGTGATACCTCTACCTATGAAGATATCTCTGGTTTTTATCGTGAG
GTAGAACTTCAGGGTTACAAGATCGATTGGACGTACATTTCCGAGAAAGACATTGATCTTTTACAAGAGAAGGGTCAGCTTTAC
TTATTTCAGATCTACAATAAAGACTTTTCGAAAAAATCCACGGGCAACGACAACCTTCATACAATGTACTTAAAGAACCTGTTC
TCTGAAGAAAACTTGAAAGATATCGTGCTTAAATTGAATGGCGAGGCCGAGATTTTTTTCCGTAAAAGCTCGATTAAGAATCCC
ATCATCCACAAGAAAGGCAGCATTCTGGTAAATCGTACCTATGAAGCGGAGGAAAAGGACCAATTTGGTAATATTCAGATTGTC
CGTAAGAACATCCCTGAAAATATCTATCAAGAATTATATAAATATTTCAACGATAAGTCGGACAAGGAACTTAGCGATGAAGCC
GCGAAGTTGAAAAATGTTGTTGGTCACCACGAAGCAGCAACAAACATTGTGAAAGACTATCGCTACACTTACGATAAGTACTTT
TTACATATGCCTATTACGATTAACTTTAAGGCAAATAAGACAGGTTTTATCAACGACCGTATCCTGCAATATATTGCAAAAGAG
AAGGACCTGCATGTCATTGGGATTGATCGCGGTGAACGCAATCTGATTTACGTGAGTGTTATTGATACCTGCGGTAATATTGTT
GAGCAAAAGTCTTTTAATATCGTTAATGGTTACGACTACCAAATTAAGCTTAAACAACAGGAAGGTGCCCGCCAGATCGCCCGT
AAGGAGTGGAAGGAAATCGGAAAAATTAAGGAAATCAAAGAGGGATATCTGAGCTTGGTTATTCATGAAATCTCAAAGATGGTT
ATTAAGTACAACGCCATCATCGCTATGGAAGACTTATCGTATGGGTTTAAAAAGGGTCGTTTCAAAGTTGAGCGCCAGGTCTAC
CAAAAGTTTGAAACGATGCTTATTAATAAATTAAACTACTTGGTTTTCAAAGATATCTCTATTACCGAGAATGGAGGTTTACTG
AAAGGATACCAGTTAACGTATATCCCCGATGTGCTTAAAAACGTGGGCCATCAGTGTGGCTGTATTTTCTATGTGCCCGCGGCA
TATACATCAAAAATTGACCCGACGACGGGTTTCGTTAATATCTTCAAGTTCAAAGATCTGACAGTTGATGCAAAACGCGAATTC
ATTAAGAAGTTCGATAGTATTCGCTATGACTCCGAGAAAAATTTGTTTTGCTTCACTTTTGACTACAATAACTTTATTACTCAG
AATACAGTCATGAGTAAAAGCTCCTGGTCGGTTTACACGTACGGGGTACGCATCAAACGTCGTTTTGTGAATGGTCGTTTTAGT
AATGAGTCGGATACAATTGATATTACCAAGGATATGGAGAAGACTCTGGAAATGACAGACATCAATTGGCGTGATGGACATGAT
TTGCGTCAGGACATTATCGACTATGAGATTGTGCAGCATATTTTCGAAATTTTTCGCCTGACGGTGCAAATGCGTAATTCCTTA
AGCGAACTGGAAGATCGCGACTATGACCGCTTAATTTCTCCTGTGCTGAATGAGAACAACATCTTCTATGACTCAGCGAAAGCC
GGGGACGCTTTGCCAAAGGATGCAGATGCTAACGGTGCATATTGTATTGCTCTGAAAGGCCTTTACGAGATCAAACAAATTACT
GAAAACTGGAAGGAAGATGGAAAGTTTTCCCGTGATAAATTGAAGATCTCTAATAAGGACTGGTTTGACTTTATCCAAAATAAA
CGTTATTTA
ErCas12a-K1019V-AA (SEQ ID NO: 178)
MNNGTNNFQNFIGISSLQKTLRNALIPTETTQQFIVKNGIIKEDELRGENRQILKDIMDDYYRGFISETLSSIDDIDWTSLFEK
MEIQLKNGDNKDTLIKEQTEYRKAIHKKFANDDRFKNMFSAKLISDILPEFVIHNNNYSASEKEEKTQVIKLFSRFATSFKDYF
KNRANCFSADDISSSSCHRIVNDNAEIFFSNALVYRRIVKSLSNDDINKISGDMKDSLKEMSLEEIYSYEKYGEFITQEGISFY
NDICGKVNSFMNLYCQKNKENKNLYKLQKLHKQILCIADTSYEVPYKFESDEEVYQSVNGELDNISSKHIVERLRKIGDNYNGY
NLDKIYIVSKFYESVSQKTYRDWETINTALEIHYNNILPGNGKSKADKVKKAVKNDLQKSITEINELVSNYKLCSDDNIKAETY
IHEISHILNNFEAQELKYNPEIHLVESELKASELKNVLDVIMNAFHWCSVFMTEELVDKDNNFYAELEEIYDEIYPVISLYNLV
RNYVTQKPYSTKKIKLNFGIPTLADGWSKSKEYSNNAIILMRDNLYYLGIFNAKNKPDKKIIEGNTSENKGDYKKMIYNLLPGP
NKMIPKVFLSSKTGVETYKPSAYILEGYKQNKHIKSSKDFDITFCHDLIDYFKNCIAIHPEWKNFGFDFSDTSTYEDISGFYRE
VELQGYKIDWTYISEKDIDLLQEKGQLYLFQIYNKDFSKKSTGNDNLHTMYLKNLFSEENLKDIVLKLNGEAEIFFRKSSIKNP
IIHKKGSILVNRTYEAEEKDQFGNIQIVRKNIPENIYQELYKYFNDKSDKELSDEAAKLKNVVGHHEAATNIVKDYRYTYDKYF
LHMPITINFKANKTGFINDRILQYIAKEKDLHVIGIDRGERNLIYVSVIDTCGNIVEQKSFNIVNGYDYQIKLKQQEGARQIAR
KEWKEIGKIKEIKEGYLSLVIHEISKMVIKYNAIIAMEDLSYGFKKGRFKVERQVYQKFETMLINKLNYLVFKDISITENGGLL
KGYQLTYIPDVLKNVGHQCGCIFYVPAAYTSKIDPTTGFVNIFKFKDLTVDAKREFIKKFDSIRYDSEKNLFCFTFDYNNFITQ
NTVMSKSSWSVYTYGVRIKRRFVNGRFSNESDTIDITKDMEKTLEMTDINWRDGHDLRQDIIDYEIVQHIFEIFRLTVQMRNSL
SELEDRDYDRLISPVLNENNIFYDSAKAGDALPKDADANGAYCIALKGLYEIKQITENWKEDGKFSRDKLKISNKDWFDFIQNK
RYL
ErCas12a-I35L/S469K-NT (SEQ ID NO: 179)
atgAATAACGGTACCAATAACTTTCAAAATTTTATCGGGATCTCCTCGTTGCAAAAAACTCTTCGTAATGCTTTAATCCCGACT
GAGACAACACAGCAGTTCCTGGTTAAAAACGGCATCATTAAAGAAGATGAGCTGCGCGGCGAGAACCGTCAGATTTTAAAGGAC
ATCATGGACGACTATTACCGTGGGTTCATCTCAGAAACATTAAGCAGCATCGATGATATCGACTGGACCTCACTGTTTGAGAAG
ATGGAGATTCAACTTAAGAATGGAGACAACAAAGACACTTTAATTAAGGAGCAGACGGAATATCGTAAAGCTATCCATAAAAAA
TTTGCAAACGATGACCGTTTCAAAAATATGTTTTCCGCAAAATTGATTAGCGACATTTTACCTGAATTCGTAATCCATAACAAC
AACTATTCCGCATCTGAAAAAGAGGAGAAGACCCAAGTTATCAAACTTTTTTCACGTTTCGCGACATCTTTTAAAGACTACTTT
AAGAATCGTGCGAATTGTTTCAGTGCAGATGATATTTCGTCTAGTTCATGTCACCGTATCGTGAATGACAACGCTGAGATTTTC
TTTTCTAATGCGTTGGTGTATCGCCGCATCGTAAAGTCCTTGTCGAATGATGATATCAACAAAATTAGTGGTGACATGAAAGAC
TCCCTGAAAGAAATGTCATTAGAGGAGATTTACAGCTACGAAAAATACGGAGAGTTCATCACTCAGGAAGGTATCTCCTTTTAC
AACGATATTTGCGGCAAAGTTAATAGTTTCATGAATCTGTATTGTCAGAAGAATAAGGAAAACAAGAATCTGTACAAGTTACAA
AAGCTTCATAAACAGATCTTGTGCATCGCCGACACGTCTTATGAAGTCCCGTATAAATTTGAAAGCGACGAAGAAGTATATCAG
AGTGTGAATGGATTCTTGGACAATATCTCATCAAAACACATTGTTGAACGTTTGCGCAAAATCGGCGACAACTATAACGGATAC
AACTTGGATAAAATTTATATCGTATCAAAATTTTATGAATCAGTATCCCAAAAGACTTACCGTGATTGGGAGACTATTAATACG
GCGTTAGAAATCCATTACAACAACATTCTGCCGGGTAACGGTAAATCGAAAGCGGACAAAGTGAAGAAGGCGGTTAAGAACGAT
CTTCAGAAGTCTATCACGGAGATTAATGAGCTGGTTTCCAATTACAAGTTGTGCTCGGATGATAACATCAAAGCTGAAACCTAT
ATCCATGAAATTTCTCATATTCTTAATAACTTCGAGGCACAAGAATTAAAATATAACCCAGAAATTCATCTGGTTGAGAGCGAA
CTTAAAGCTTCAGAATTAAAAAATGTTTTGGACGTAATTATGAACGCCTTCCATTGGTGCAAAGTGTTTATGACAGAGGAGTTA
GTAGATAAGGATAACAACTTTTATGCAGAATTGGAAGAGATCTATGATGAGATCTATCCAGTGATTTCACTGTATAACTTAGTC
CGTAATTACGTCACTCAGAAGCCGTACTCAACTAAAAAGATCAAGTTAAATTTTGGAATTCCGACATTGGCGGATGGTTGGAGT
AAGTCTAAGGAATACTCAAATAACGCTATTATCTTAATGCGTGACAACCTGTATTACTTGGGTATTTTCAATGCCAAAAATAAG
CCCGATAAAAAAATCATTGAAGGGAATACTTCAGAAAATAAGGGAGATTACAAAAAAATGATTTATAACCTTTTGCCAGGCCCA
AACAAAATGATCCCCAAGGTGTTTTTGAGTAGTAAGACGGGAGTAGAAACATATAAGCCATCAGCGTACATTCTTGAAGGGTAC
AAACAAAATAAACACATCAAGAGCAGCAAGGACTTTGACATTACATTTTGTCATGACTTAATCGACTACTTTAAAAATTGCATT
GCCATTCACCCTGAGTGGAAAAATTTTGGTTTCGACTTCAGTGATACCTCTACCTATGAAGATATCTCTGGTTTTTATCGTGAG
GTAGAACTTCAGGGTTACAAGATCGATTGGACGTACATTTCCGAGAAAGACATTGATCTTTTACAAGAGAAGGGTCAGCTTTAC
TTATTTCAGATCTACAATAAAGACTTTTCGAAAAAATCCACGGGCAACGACAACCTTCATACAATGTACTTAAAGAACCTGTTC
TCTGAAGAAAACTTGAAAGATATCGTGCTTAAATTGAATGGCGAGGCCGAGATTTTTTTCCGTAAAAGCTCGATTAAGAATCCC
ATCATCCACAAGAAAGGCAGCATTCTGGTAAATCGTACCTATGAAGCGGAGGAAAAGGACCAATTTGGTAATATTCAGATTGTC
CGTAAGAACATCCCTGAAAATATCTATCAAGAATTATATAAATATTTCAACGATAAGTCGGACAAGGAACTTAGCGATGAAGCC
GCGAAGTTGAAAAATGTTGTTGGTCACCACGAAGCAGCAACAAACATTGTGAAAGACTATCGCTACACTTACGATAAGTACTTT
TTACATATGCCTATTACGATTAACTTTAAGGCAAATAAGACAGGTTTTATCAACGACCGTATCCTGCAATATATTGCAAAAGAG
AAGGACCTGCATGTCATTGGGATTGATCGCGGTGAACGCAATCTGATTTACGTGAGTGTTATTGATACCTGCGGTAATATTGTT
GAGCAAAAGTCTTTTAATATCGTTAATGGTTACGACTACCAAATTAAGCTTAAACAACAGGAAGGTGCCCGCCAGATCGCCCGT
AAGGAGTGGAAGGAAATCGGAAAAATTAAGGAAATCAAAGAGGGATATCTGAGCTTGGTTATTCATGAAATCTCAAAGATGGTT
ATTAAGTACAACGCCATCATCGCTATGGAAGACTTATCGTATGGGTTTAAAAAGGGTCGTTTCAAAGTTGAGCGCCAGGTCTAC
CAAAAGTTTGAAACGATGCTTATTAATAAATTAAACTACTTGGTTTTCAAAGATATCTCTATTACCGAGAATGGAGGTTTACTG
AAAGGATACCAGTTAACGTATATCCCCGATAAGCTTAAAAACGTGGGCCATCAGTGTGGCTGTATTTTCTATGTGCCCGCGGCA
TATACATCAAAAATTGACCCGACGACGGGTTTCGTTAATATCTTCAAGTTCAAAGATCTGACAGTTGATGCAAAACGCGAATTC
ATTAAGAAGTTCGATAGTATTCGCTATGACTCCGAGAAAAATTTGTTTTGCTTCACTTTTGACTACAATAACTTTATTACTCAG
AATACAGTCATGAGTAAAAGCTCCTGGTCGGTTTACACGTACGGGGTACGCATCAAACGTCGTTTTGTGAATGGTCGTTTTAGT
AATGAGTCGGATACAATTGATATTACCAAGGATATGGAGAAGACTCTGGAAATGACAGACATCAATTGGCGTGATGGACATGAT
TTGCGTCAGGACATTATCGACTATGAGATTGTGCAGCATATTTTCGAAATTTTTCGCCTGACGGTGCAAATGCGTAATTCCTTA
AGCGAACTGGAAGATCGCGACTATGACCGCTTAATTTCTCCTGTGCTGAATGAGAACAACATCTTCTATGACTCAGCGAAAGCC
GGGGACGCTTTGCCAAAGGATGCAGATGCTAACGGTGCATATTGTATTGCTCTGAAAGGCCTTTACGAGATCAAACAAATTACT
GAAAACTGGAAGGAAGATGGAAAGTTTTCCCGTGATAAATTGAAGATCTCTAATAAGGACTGGTTTGACTTTATCCAAAATAAA
CGTTATTTA
ErCas12a-I35L/S469K-AA (SEQ ID NO: 180)
MNNGTNNFQNFIGISSLQKTLRNALIPTETTQQFIVKNGIIKEDELRGENRQILKDIMDDYYRGFISETLSSIDDIDWTSLFEK
MEIQLKNGDNKDTLIKEQTEYRKAIHKKFANDDRFKNMFSAKLISDILPEFVIHNNNYSASEKEEKTQVIKLESRFATSFKDYF
KNRANCESADDISSSSCHRIVNDNAEIFFSNALVYRRIVKSLSNDDINKISGDMKDSLKEMSLEEIYSYEKYGEFITQEGISFY
NDICGKVNSFMNLYCQKNKENKNLYKLQKLHKQILCIADTSYEVPYKFESDEEVYQSVNGELDNISSKHIVERLRKIGDNYNGY
NLDKIYIVSKFYESVSQKTYRDWETINTALEIHYNNILPGNGKSKADKVKKAVKNDLQKSITEINELVSNYKLCSDDNIKAETY
IHEISHILNNFEAQELKYNPEIHLVESELKASELKNVLDVIMNAFHWCKVFMTEELVDKDNNFYAELEEIYDEIYPVISLYNLV
RNYVTQKPYSTKKIKLNFGIPTLADGWSKSKEYSNNAIILMRDNLYYLGIFNAKNKPDKKIIEGNTSENKGDYKKMIYNLLPGP
NKMIPKVFLSSKTGVETYKPSAYILEGYKQNKHIKSSKDFDITFCHDLIDYFKNCIAIHPEWKNFGFDFSDTSTYEDISGFYRE
VELQGYKIDWTYISEKDIDLLQEKGQLYLFQIYNKDFSKKSTGNDNLHTMYLKNLFSEENLKDIVLKLNGEAEIFFRKSSIKNP
IIHKKGSILVNRTYEAEEKDQFGNIQIVRKNIPENIYQELYKYFNDKSDKELSDEAAKLKNVVGHHEAATNIVKDYRYTYDKYF
LHMPITINFKANKTGFINDRILQYIAKEKDLHVIGIDRGERNLIYVSVIDTCGNIVEQKSFNIVNGYDYQIKLKQQEGARQIAR
KEWKEIGKIKEIKEGYLSLVIHEISKMVIKYNAIIAMEDLSYGFKKGRFKVERQVYQKFETMLINKLNYLVFKDISITENGGLL
KGYQLTYIPDKLKNVGHQCGCIFYVPAAYTSKIDPTTGFVNIFKFKDLTVDAKREFIKKFDSIRYDSEKNLFCFTFDYNNFITQ
NTVMSKSSWSVYTYGVRIKRRFVNGRFSNESDTIDITKDMEKTLEMTDINWRDGHDLRQDIIDYEIVQHIFEIFRLTVQMRNSL
SELEDRDYDRLISPVLNENNIFYDSAKAGDALPKDADANGAYCIALKGLYEIKQITENWKEDGKFSRDKLKISNKDWFDFIQNK
RYL
ErCas12a-I35L/T826F-NT (SEQ ID NO: 181)
atgAATAACGGTACCAATAACTTTCAAAATTTTATCGGGATCTCCTCGTTGCAAAAAACTCTTCGTAATGCTTTAATCCCGACT
GAGACAACACAGCAGTTCCTGGTTAAAAACGGCATCATTAAAGAAGATGAGCTGCGCGGCGAGAACCGTCAGATTTTAAAGGAC
ATCATGGACGACTATTACCGTGGGTTCATCTCAGAAACATTAAGCAGCATCGATGATATCGACTGGACCTCACTGTTTGAGAAG
ATGGAGATTCAACTTAAGAATGGAGACAACAAAGACACTTTAATTAAGGAGCAGACGGAATATCGTAAAGCTATCCATAAAAAA
TTTGCAAACGATGACCGTTTCAAAAATATGTTTTCCGCAAAATTGATTAGCGACATTTTACCTGAATTCGTAATCCATAACAAC
AACTATTCCGCATCTGAAAAAGAGGAGAAGACCCAAGTTATCAAACTTTTTTCACGTTTCGCGACATCTTTTAAAGACTACTTT
AAGAATCGTGCGAATTGTTTCAGTGCAGATGATATTTCGTCTAGTTCATGTCACCGTATCGTGAATGACAACGCTGAGATTTTC
TTTTCTAATGCGTTGGTGTATCGCCGCATCGTAAAGTCCTTGTCGAATGATGATATCAACAAAATTAGTGGTGACATGAAAGAC
TCCCTGAAAGAAATGTCATTAGAGGAGATTTACAGCTACGAAAAATACGGAGAGTTCATCACTCAGGAAGGTATCTCCTTTTAC
AACGATATTTGCGGCAAAGTTAATAGTTTCATGAATCTGTATTGTCAGAAGAATAAGGAAAACAAGAATCTGTACAAGTTACAA
AAGCTTCATAAACAGATCTTGTGCATCGCCGACACGTCTTATGAAGTCCCGTATAAATTTGAAAGCGACGAAGAAGTATATCAG
AGTGTGAATGGATTCTTGGACAATATCTCATCAAAACACATTGTTGAACGTTTGCGCAAAATCGGCGACAACTATAACGGATAC
AACTTGGATAAAATTTATATCGTATCAAAATTTTATGAATCAGTATCCCAAAAGACTTACCGTGATTGGGAGACTATTAATACG
GCGTTAGAAATCCATTACAACAACATTCTGCCGGGTAACGGTAAATCGAAAGCGGACAAAGTGAAGAAGGCGGTTAAGAACGAT
CTTCAGAAGTCTATCACGGAGATTAATGAGCTGGTTTCCAATTACAAGTTGTGCTCGGATGATAACATCAAAGCTGAAACCTAT
ATCCATGAAATTTCTCATATTCTTAATAACTTCGAGGCACAAGAATTAAAATATAACCCAGAAATTCATCTGGTTGAGAGCGAA
CTTAAAGCTTCAGAATTAAAAAATGTTTTGGACGTAATTATGAACGCCTTCCATTGGTGCAGCGTGTTTATGACAGAGGAGTTA
GTAGATAAGGATAACAACTTTTATGCAGAATTGGAAGAGATCTATGATGAGATCTATCCAGTGATTTCACTGTATAACTTAGTC
CGTAATTACGTCACTCAGAAGCCGTACTCAACTAAAAAGATCAAGTTAAATTTTGGAATTCCGACATTGGCGGATGGTTGGAGT
AAGTCTAAGGAATACTCAAATAACGCTATTATCTTAATGCGTGACAACCTGTATTACTTGGGTATTTTCAATGCCAAAAATAAG
CCCGATAAAAAAATCATTGAAGGGAATACTTCAGAAAATAAGGGAGATTACAAAAAAATGATTTATAACCTTTTGCCAGGCCCA
AACAAAATGATCCCCAAGGTGTTTTTGAGTAGTAAGACGGGAGTAGAAACATATAAGCCATCAGCGTACATTCTTGAAGGGTAC
AAACAAAATAAACACATCAAGAGCAGCAAGGACTTTGACATTACATTTTGTCATGACTTAATCGACTACTTTAAAAATTGCATT
GCCATTCACCCTGAGTGGAAAAATTTTGGTTTCGACTTCAGTGATACCTCTACCTATGAAGATATCTCTGGTTTTTATCGTGAG
GTAGAACTTCAGGGTTACAAGATCGATTGGACGTACATTTCCGAGAAAGACATTGATCTTTTACAAGAGAAGGGTCAGCTTTAC
TTATTTCAGATCTACAATAAAGACTTTTCGAAAAAATCCACGGGCAACGACAACCTTCATACAATGTACTTAAAGAACCTGTTC
TCTGAAGAAAACTTGAAAGATATCGTGCTTAAATTGAATGGCGAGGCCGAGATTTTTTTCCGTAAAAGCTCGATTAAGAATCCC
ATCATCCACAAGAAAGGCAGCATTCTGGTAAATCGTACCTATGAAGCGGAGGAAAAGGACCAATTTGGTAATATTCAGATTGTC
CGTAAGAACATCCCTGAAAATATCTATCAAGAATTATATAAATATTTCAACGATAAGTCGGACAAGGAACTTAGCGATGAAGCC
GCGAAGTTGAAAAATGTTGTTGGTCACCACGAAGCAGCATTTAACATTGTGAAAGACTATCGCTACACTTACGATAAGTACTTT
TTACATATGCCTATTACGATTAACTTTAAGGCAAATAAGACAGGTTTTATCAACGACCGTATCCTGCAATATATTGCAAAAGAG
AAGGACCTGCATGTCATTGGGATTGATCGCGGTGAACGCAATCTGATTTACGTGAGTGTTATTGATACCTGCGGTAATATTGTT
GAGCAAAAGTCTTTTAATATCGTTAATGGTTACGACTACCAAATTAAGCTTAAACAACAGGAAGGTGCCCGCCAGATCGCCCGT
AAGGAGTGGAAGGAAATCGGAAAAATTAAGGAAATCAAAGAGGGATATCTGAGCTTGGTTATTCATGAAATCTCAAAGATGGTT
ATTAAGTACAACGCCATCATCGCTATGGAAGACTTATCGTATGGGTTTAAAAAGGGTCGTTTCAAAGTTGAGCGCCAGGTCTAC
CAAAAGTTTGAAACGATGCTTATTAATAAATTAAACTACTTGGTTTTCAAAGATATCTCTATTACCGAGAATGGAGGTTTACTG
AAAGGATACCAGTTAACGTATATCCCCGATAAGCTTAAAAACGTGGGCCATCAGTGTGGCTGTATTTTCTATGTGCCCGCGGCA
TATACATCAAAAATTGACCCGACGACGGGTTTCGTTAATATCTTCAAGTTCAAAGATCTGACAGTTGATGCAAAACGCGAATTC
ATTAAGAAGTTCGATAGTATTCGCTATGACTCCGAGAAAAATTTGTTTTGCTTCACTTTTGACTACAATAACTTTATTACTCAG
AATACAGTCATGAGTAAAAGCTCCTGGTCGGTTTACACGTACGGGGTACGCATCAAACGTCGTTTTGTGAATGGTCGTTTTAGT
AATGAGTCGGATACAATTGATATTACCAAGGATATGGAGAAGACTCTGGAAATGACAGACATCAATTGGCGTGATGGACATGAT
TTGCGTCAGGACATTATCGACTATGAGATTGTGCAGCATATTTTCGAAATTTTTCGCCTGACGGTGCAAATGCGTAATTCCTTA
AGCGAACTGGAAGATCGCGACTATGACCGCTTAATTTCTCCTGTGCTGAATGAGAACAACATCTTCTATGACTCAGCGAAAGCC
GGGGACGCTTTGCCAAAGGATGCAGATGCTAACGGTGCATATTGTATTGCTCTGAAAGGCCTTTACGAGATCAAACAAATTACT
GAAAACTGGAAGGAAGATGGAAAGTTTTCCCGTGATAAATTGAAGATCTCTAATAAGGACTGGTTTGACTTTATCCAAAATAAA
CGTTATTTA
ErCas12a-I35L/T826F-AA (SEQ ID NO: 182)
MNNGTNNFQNFIGISSLQKTLRNALIPTETTQQFIVKNGIIKEDELRGENRQILKDIMDDYYRGFISETLSSIDDIDWTSLFEK
MEIQLKNGDNKDTLIKEQTEYRKAIHKKFANDDRFKNMFSAKLISDILPEFVIHNNNYSASEKEEKTQVIKLFSRFATSFKDYF
KNRANCFSADDISSSSCHRIVNDNAEIFFSNALVYRRIVKSLSNDDINKISGDMKDSLKEMSLEEIYSYEKYGEFITQEGISFY
NDICGKVNSFMNLYCQKNKENKNLYKLQKLHKQILCIADTSYEVPYKFESDEEVYQSVNGELDNISSKHIVERLRKIGDNYNGY
NLDKIYIVSKFYESVSQKTYRDWETINTALEIHYNNILPGNGKSKADKVKKAVKNDLQKSITEINELVSNYKLCSDDNIKAETY
IHEISHILNNFEAQELKYNPEIHLVESELKASELKNVLDVIMNAFHWCSVEMTEELVDKDNNFYAELEEIYDEIYPVISLYNLV
RNYVTQKPYSTKKIKLNFGIPTLADGWSKSKEYSNNAIILMRDNLYYLGIFNAKNKPDKKIIEGNTSENKGDYKKMIYNLLPGP
NKMIPKVFLSSKTGVETYKPSAYILEGYKQNKHIKSSKDFDITFCHDLIDYFKNCIAIHPEWKNFGFDFSDTSTYEDISGFYRE
VELQGYKIDWTYISEKDIDLLQEKGQLYLFQIYNKDFSKKSTGNDNLHTMYLKNLFSEENLKDIVLKLNGEAEIFFRKSSIKNP
IIHKKGSILVNRTYEAEEKDQFGNIQIVRKNIPENIYQELYKYENDKSDKELSDEAAKLKNVVGHHEAAFNIVKDYRYTYDKYF
LHMPITINFKANKTGFINDRILQYIAKEKDLHVIGIDRGERNLIYVSVIDTCGNIVEQKSFNIVNGYDYQIKLKQQEGARQIAR
KEWKEIGKIKEIKEGYLSLVIHEISKMVIKYNAIIAMEDLSYGFKKGRFKVERQVYQKFETMLINKLNYLVFKDISITENGGLL
KGYQLTYIPDKLKNVGHQCGCIFYVPAAYTSKIDPTTGFVNIFKFKDLTVDAKREFIKKFDSIRYDSEKNLFCFTEDYNNFITQ
NTVMSKSSWSVYTYGVRIKRRFVNGRFSNESDTIDITKDMEKTLEMTDINWRDGHDLRQDIIDYEIVQHIFEIFRLTVQMRNSL
SELEDRDYDRLISPVLNENNIFYDSAKAGDALPKDADANGAYCIALKGLYEIKQITENWKEDGKFSRDKLKISNKDWFDFIQNK
RYL
ErCas12a-140Q/S469K-NT (SEQ ID NO: 183)
atgAATAACGGTACCAATAACTTTCAAAATTTTATCGGGATCTCCTCGTTGCAAAAAACTCTTCGTAATGCTTTAATCCCGACT
GAGACAACACAGCAGTTCATCGTTAAAAACGGCCAGATTAAAGAAGATGAGCTGCGCGGCGAGAACCGTCAGATTTTAAAGGAC
ATCATGGACGACTATTACCGTGGGTTCATCTCAGAAACATTAAGCAGCATCGATGATATCGACTGGACCTCACTGTTTGAGAAG
ATGGAGATTCAACTTAAGAATGGAGACAACAAAGACACTTTAATTAAGGAGCAGACGGAATATCGTAAAGCTATCCATAAAAAA
TTTGCAAACGATGACCGTTTCAAAAATATGTTTTCCGCAAAATTGATTAGCGACATTTTACCTGAATTCGTAATCCATAACAAC
AACTATTCCGCATCTGAAAAAGAGGAGAAGACCCAAGTTATCAAACTTTTTTCACGTTTCGCGACATCTTTTAAAGACTACTTT
AAGAATCGTGCGAATTGTTTCAGTGCAGATGATATTTCGTCTAGTTCATGTCACCGTATCGTGAATGACAACGCTGAGATTTTC
TTTTCTAATGCGTTGGTGTATCGCCGCATCGTAAAGTCCTTGTCGAATGATGATATCAACAAAATTAGTGGTGACATGAAAGAC
TCCCTGAAAGAAATGTCATTAGAGGAGATTTACAGCTACGAAAAATACGGAGAGTTCATCACTCAGGAAGGTATCTCCTTTTAC
AACGATATTTGCGGCAAAGTTAATAGTTTCATGAATCTGTATTGTCAGAAGAATAAGGAAAACAAGAATCTGTACAAGTTACAA
AAGCTTCATAAACAGATCTTGTGCATCGCCGACACGTCTTATGAAGTCCCGTATAAATTTGAAAGCGACGAAGAAGTATATCAG
AGTGTGAATGGATTCTTGGACAATATCTCATCAAAACACATTGTTGAACGTTTGCGCAAAATCGGCGACAACTATAACGGATAC
AACTTGGATAAAATTTATATCGTATCAAAATTTTATGAATCAGTATCCCAAAAGACTTACCGTGATTGGGAGACTATTAATACG
GCGTTAGAAATCCATTACAACAACATTCTGCCGGGTAACGGTAAATCGAAAGCGGACAAAGTGAAGAAGGCGGTTAAGAACGAT
CTTCAGAAGTCTATCACGGAGATTAATGAGCTGGTTTCCAATTACAAGTTGTGCTCGGATGATAACATCAAAGCTGAAACCTAT
ATCCATGAAATTTCTCATATTCTTAATAACTTCGAGGCACAAGAATTAAAATATAACCCAGAAATTCATCTGGTTGAGAGCGAA
CTTAAAGCTTCAGAATTAAAAAATGTTTTGGACGTAATTATGAACGCCTTCCATTGGTGCAAAGTGTTTATGACAGAGGAGTTA
GTAGATAAGGATAACAACTTTTATGCAGAATTGGAAGAGATCTATGATGAGATCTATCCAGTGATTTCACTGTATAACTTAGTC
CGTAATTACGTCACTCAGAAGCCGTACTCAACTAAAAAGATCAAGTTAAATTTTGGAATTCCGACATTGGCGGATGGTTGGAGT
AAGTCTAAGGAATACTCAAATAACGCTATTATCTTAATGCGTGACAACCTGTATTACTTGGGTATTTTCAATGCCAAAAATAAG
CCCGATAAAAAAATCATTGAAGGGAATACTTCAGAAAATAAGGGAGATTACAAAAAAATGATTTATAACCTTTTGCCAGGCCCA
AACAAAATGATCCCCAAGGTGTTTTTGAGTAGTAAGACGGGAGTAGAAACATATAAGCCATCAGCGTACATTCTTGAAGGGTAC
AAACAAAATAAACACATCAAGAGCAGCAAGGACTTTGACATTACATTTTGTCATGACTTAATCGACTACTTTAAAAATTGCATT
GCCATTCACCCTGAGTGGAAAAATTTTGGTTTCGACTTCAGTGATACCTCTACCTATGAAGATATCTCTGGTTTTTATCGTGAG
GTAGAACTTCAGGGTTACAAGATCGATTGGACGTACATTTCCGAGAAAGACATTGATCTTTTACAAGAGAAGGGTCAGCTTTAC
TTATTTCAGATCTACAATAAAGACTTTTCGAAAAAATCCACGGGCAACGACAACCTTCATACAATGTACTTAAAGAACCTGTTC
TCTGAAGAAAACTTGAAAGATATCGTGCTTAAATTGAATGGCGAGGCCGAGATTTTTTTCCGTAAAAGCTCGATTAAGAATCCC
ATCATCCACAAGAAAGGCAGCATTCTGGTAAATCGTACCTATGAAGCGGAGGAAAAGGACCAATTTGGTAATATTCAGATTGTC
CGTAAGAACATCCCTGAAAATATCTATCAAGAATTATATAAATATTTCAACGATAAGTCGGACAAGGAACTTAGCGATGAAGCC
GCGAAGTTGAAAAATGTTGTTGGTCACCACGAAGCAGCAACAAACATTGTGAAAGACTATCGCTACACTTACGATAAGTACTTT
TTACATATGCCTATTACGATTAACTTTAAGGCAAATAAGACAGGTTTTATCAACGACCGTATCCTGCAATATATTGCAAAAGAG
AAGGACCTGCATGTCATTGGGATTGATCGCGGTGAACGCAATCTGATTTACGTGAGTGTTATTGATACCTGCGGTAATATTGTT
GAGCAAAAGTCTTTTAATATCGTTAATGGTTACGACTACCAAATTAAGCTTAAACAACAGGAAGGTGCCCGCCAGATCGCCCGT
AAGGAGTGGAAGGAAATCGGAAAAATTAAGGAAATCAAAGAGGGATATCTGAGCTTGGTTATTCATGAAATCTCAAAGATGGTT
ATTAAGTACAACGCCATCATCGCTATGGAAGACTTATCGTATGGGTTTAAAAAGGGTCGTTTCAAAGTTGAGCGCCAGGTCTAC
CAAAAGTTTGAAACGATGCTTATTAATAAATTAAACTACTTGGTTTTCAAAGATATCTCTATTACCGAGAATGGAGGTTTACTG
AAAGGATACCAGTTAACGTATATCCCCGATAAGCTTAAAAACGTGGGCCATCAGTGTGGCTGTATTTTCTATGTGCCCGCGGCA
TATACATCAAAAATTGACCCGACGACGGGTTTCGTTAATATCTTCAAGTTCAAAGATCTGACAGTTGATGCAAAACGCGAATTC
ATTAAGAAGTTCGATAGTATTCGCTATGACTCCGAGAAAAATTTGTTTTGCTTCACTTTTGACTACAATAACTTTATTACTCAG
AATACAGTCATGAGTAAAAGCTCCTGGTCGGTTTACACGTACGGGGTACGCATCAAACGTCGTTTTGTGAATGGTCGTTTTAGT
AATGAGTCGGATACAATTGATATTACCAAGGATATGGAGAAGACTCTGGAAATGACAGACATCAATTGGCGTGATGGACATGAT
TTGCGTCAGGACATTATCGACTATGAGATTGTGCAGCATATTTTCGAAATTTTTCGCCTGACGGTGCAAATGCGTAATTCCTTA
AGCGAACTGGAAGATCGCGACTATGACCGCTTAATTTCTCCTGTGCTGAATGAGAACAACATCTTCTATGACTCAGCGAAAGCC
GGGGACGCTTTGCCAAAGGATGCAGATGCTAACGGTGCATATTGTATTGCTCTGAAAGGCCTTTACGAGATCAAACAAATTACT
GAAAACTGGAAGGAAGATGGAAAGTTTTCCCGTGATAAATTGAAGATCTCTAATAAGGACTGGTTTGACTTTATCCAAAATAAA
CGTTATTTA
ErCas12a-I40Q/S469K-AA (SEQ ID NO: 184)
MNNGTNNFQNFIGISSLQKTLRNALIPTETTQQFIVKNGQIKEDELRGENRQILKDIMDDYYRGFISETLSSIDDIDWTSLFEK
MEIQLKNGDNKDTLIKEQTEYRKAIHKKFANDDRFKNMFSAKLISDILPEFVIHNNNYSASEKEEKTQVIKLFSRFATSFKDYF
KNRANCFSADDISSSSCHRIVNDNAEIFFSNALVYRRIVKSLSNDDINKISGDMKDSLKEMSLEEIYSYEKYGEFITQEGISFY
NDICGKVNSFMNLYCQKNKENKNLYKLQKLHKQILCIADTSYEVPYKFESDEEVYQSVNGELDNISSKHIVERLRKIGDNYNGY
NLDKIYIVSKFYESVSQKTYRDWETINTALEIHYNNILPGNGKSKADKVKKAVKNDLQKSITEINELVSNYKLCSDDNIKAETY
IHEISHILNNFEAQELKYNPEIHLVESELKASELKNVLDVIMNAFHWCKVFMTEELVDKDNNFYAELEEIYDEIYPVISLYNLV
RNYVTQKPYSTKKIKLNFGIPTLADGWSKSKEYSNNAIILMRDNLYYLGIFNAKNKPDKKIIEGNTSENKGDYKKMIYNLLPGP
NKMIPKVFLSSKTGVETYKPSAYILEGYKQNKHIKSSKDFDITFCHDLIDYFKNCIAIHPEWKNFGFDFSDTSTYEDISGFYRE
VELQGYKIDWTYISEKDIDLLQEKGQLYLFQIYNKDFSKKSTGNDNLHTMYLKNLFSEENLKDIVLKLNGEAEIFFRKSSIKNP
IIHKKGSILVNRTYEAEEKDQFGNIQIVRKNIPENIYQELYKYFNDKSDKELSDEAAKLKNVVGHHEAATNIVKDYRYTYDKYF
LHMPITINFKANKTGFINDRILQYIAKEKDLHVIGIDRGERNLIYVSVIDTCGNIVEQKSFNIVNGYDYQIKLKQQEGARQIAR
KEWKEIGKIKEIKEGYLSLVIHEISKMVIKYNAIIAMEDLSYGFKKGRFKVERQVYQKFETMLINKLNYLVFKDISITENGGLL
KGYQLTYIPDKLKNVGHQCGCIFYVPAAYTSKIDPTTGFVNIFKFKDLTVDAKREFIKKFDSIRYDSEKNLFCFTFDYNNFITQ
NTVMSKSSWSVYTYGVRIKRRFVNGRFSNESDTIDITKDMEKTLEMTDINWRDGHDLRQDIIDYEIVQHIFEIFRLTVQMRNSL
SELEDRDYDRLISPVLNENNIFYDSAKAGDALPKDADANGAYCIALKGLYEIKQITENWKEDGKFSRDKLKISNKDWEDFIQNK
RYL
ErCas12a-I40Q/T826F-NT (SEQ ID NO: 185)
atgAATAACGGTACCAATAACTTTCAAAATTTTATCGGGATCTCCTCGTTGCAAAAAACTCTTCGTAATGCTTTAATCCCGACT
GAGACAACACAGCAGTTCATCGTTAAAAACGGCCAGATTAAAGAAGATGAGCTGCGCGGCGAGAACCGTCAGATTTTAAAGGAC
ATCATGGACGACTATTACCGTGGGTTCATCTCAGAAACATTAAGCAGCATCGATGATATCGACTGGACCTCACTGTTTGAGAAG
ATGGAGATTCAACTTAAGAATGGAGACAACAAAGACACTTTAATTAAGGAGCAGACGGAATATCGTAAAGCTATCCATAAAAAA
TTTGCAAACGATGACCGTTTCAAAAATATGTTTTCCGCAAAATTGATTAGCGACATTTTACCTGAATTCGTAATCCATAACAAC
AACTATTCCGCATCTGAAAAAGAGGAGAAGACCCAAGTTATCAAACTTTTTTCACGTTTCGCGACATCTTTTAAAGACTACTTT
AAGAATCGTGCGAATTGTTTCAGTGCAGATGATATTTCGTCTAGTTCATGTCACCGTATCGTGAATGACAACGCTGAGATTTTC
TTTTCTAATGCGTTGGTGTATCGCCGCATCGTAAAGTCCTTGTCGAATGATGATATCAACAAAATTAGTGGTGACATGAAAGAC
TCCCTGAAAGAAATGTCATTAGAGGAGATTTACAGCTACGAAAAATACGGAGAGTTCATCACTCAGGAAGGTATCTCCTTTTAC
AACGATATTTGCGGCAAAGTTAATAGTTTCATGAATCTGTATTGTCAGAAGAATAAGGAAAACAAGAATCTGTACAAGTTACAA
AAGCTTCATAAACAGATCTTGTGCATCGCCGACACGTCTTATGAAGTCCCGTATAAATTTGAAAGCGACGAAGAAGTATATCAG
AGTGTGAATGGATTCTTGGACAATATCTCATCAAAACACATTGTTGAACGTTTGCGCAAAATCGGCGACAACTATAACGGATAC
AACTTGGATAAAATTTATATCGTATCAAAATTTTATGAATCAGTATCCCAAAAGACTTACCGTGATTGGGAGACTATTAATACG
GCGTTAGAAATCCATTACAACAACATTCTGCCGGGTAACGGTAAATCGAAAGCGGACAAAGTGAAGAAGGCGGTTAAGAACGAT
CTTCAGAAGTCTATCACGGAGATTAATGAGCTGGTTTCCAATTACAAGTTGTGCTCGGATGATAACATCAAAGCTGAAACCTAT
ATCCATGAAATTTCTCATATTCTTAATAACTTCGAGGCACAAGAATTAAAATATAACCCAGAAATTCATCTGGTTGAGAGCGAA
CTTAAAGCTTCAGAATTAAAAAATGTTTTGGACGTAATTATGAACGCCTTCCATTGGTGCAGCGTGTTTATGACAGAGGAGTTA
GTAGATAAGGATAACAACTTTTATGCAGAATTGGAAGAGATCTATGATGAGATCTATCCAGTGATTTCACTGTATAACTTAGTC
CGTAATTACGTCACTCAGAAGCCGTACTCAACTAAAAAGATCAAGTTAAATTTTGGAATTCCGACATTGGCGGATGGTTGGAGT
AAGTCTAAGGAATACTCAAATAACGCTATTATCTTAATGCGTGACAACCTGTATTACTTGGGTATTTTCAATGCCAAAAATAAG
CCCGATAAAAAAATCATTGAAGGGAATACTTCAGAAAATAAGGGAGATTACAAAAAAATGATTTATAACCTTTTGCCAGGCCCA
AACAAAATGATCCCCAAGGTGTTTTTGAGTAGTAAGACGGGAGTAGAAACATATAAGCCATCAGCGTACATTCTTGAAGGGTAC
AAACAAAATAAACACATCAAGAGCAGCAAGGACTTTGACATTACATTTTGTCATGACTTAATCGACTACTTTAAAAATTGCATT
GCCATTCACCCTGAGTGGAAAAATTTTGGTTTCGACTTCAGTGATACCTCTACCTATGAAGATATCTCTGGTTTTTATCGTGAG
GTAGAACTTCAGGGTTACAAGATCGATTGGACGTACATTTCCGAGAAAGACATTGATCTTTTACAAGAGAAGGGTCAGCTTTAC
TTATTTCAGATCTACAATAAAGACTTTTCGAAAAAATCCACGGGCAACGACAACCTTCATACAATGTACTTAAAGAACCTGTTC
TCTGAAGAAAACTTGAAAGATATCGTGCTTAAATTGAATGGCGAGGCCGAGATTTTTTTCCGTAAAAGCTCGATTAAGAATCCC
ATCATCCACAAGAAAGGCAGCATTCTGGTAAATCGTACCTATGAAGCGGAGGAAAAGGACCAATTTGGTAATATTCAGATTGTC
CGTAAGAACATCCCTGAAAATATCTATCAAGAATTATATAAATATTTCAACGATAAGTCGGACAAGGAACTTAGCGATGAAGCC
GCGAAGTTGAAAAATGTTGTTGGTCACCACGAAGCAGCATTTAACATTGTGAAAGACTATCGCTACACTTACGATAAGTACTTT
TTACATATGCCTATTACGATTAACTTTAAGGCAAATAAGACAGGTTTTATCAACGACCGTATCCTGCAATATATTGCAAAAGAG
AAGGACCTGCATGTCATTGGGATTGATCGCGGTGAACGCAATCTGATTTACGTGAGTGTTATTGATACCTGCGGTAATATTGTT
GAGCAAAAGTCTTTTAATATCGTTAATGGTTACGACTACCAAATTAAGCTTAAACAACAGGAAGGTGCCCGCCAGATCGCCCGT
AAGGAGTGGAAGGAAATCGGAAAAATTAAGGAAATCAAAGAGGGATATCTGAGCTTGGTTATTCATGAAATCTCAAAGATGGTT
ATTAAGTACAACGCCATCATCGCTATGGAAGACTTATCGTATGGGTTTAAAAAGGGTCGTTTCAAAGTTGAGCGCCAGGTCTAC
CAAAAGTTTGAAACGATGCTTATTAATAAATTAAACTACTTGGTTTTCAAAGATATCTCTATTACCGAGAATGGAGGTTTACTG
AAAGGATACCAGTTAACGTATATCCCCGATAAGCTTAAAAACGTGGGCCATCAGTGTGGCTGTATTTTCTATGTGCCCGCGGCA
TATACATCAAAAATTGACCCGACGACGGGTTTCGTTAATATCTTCAAGTTCAAAGATCTGACAGTTGATGCAAAACGCGAATTC
ATTAAGAAGTTCGATAGTATTCGCTATGACTCCGAGAAAAATTTGTTTTGCTTCACTTTTGACTACAATAACTTTATTACTCAG
AATACAGTCATGAGTAAAAGCTCCTGGTCGGTTTACACGTACGGGGTACGCATCAAACGTCGTTTTGTGAATGGTCGTTTTAGT
AATGAGTCGGATACAATTGATATTACCAAGGATATGGAGAAGACTCTGGAAATGACAGACATCAATTGGCGTGATGGACATGAT
TTGCGTCAGGACATTATCGACTATGAGATTGTGCAGCATATTTTCGAAATTTTTCGCCTGACGGTGCAAATGCGTAATTCCTTA
AGCGAACTGGAAGATCGCGACTATGACCGCTTAATTTCTCCTGTGCTGAATGAGAACAACATCTTCTATGACTCAGCGAAAGCC
GGGGACGCTTTGCCAAAGGATGCAGATGCTAACGGTGCATATTGTATTGCTCTGAAAGGCCTTTACGAGATCAAACAAATTACT
GAAAACTGGAAGGAAGATGGAAAGTTTTCCCGTGATAAATTGAAGATCTCTAATAAGGACTGGTTTGACTTTATCCAAAATAAA
CGTTATTTA
ErCas12a-I40Q/T826F-AA (SEQ ID NO: 186)
MNNGTNNFQNFIGISSLQKTLRNALIPTETTQQFIVKNGQIKEDELRGENRQILKDIMDDYYRGFISETLSSIDDIDWTSLFEK
MEIQLKNGDNKDTLIKEQTEYRKAIHKKFANDDRFKNMFSAKLISDILPEFVIHNNNYSASEKEEKTQVIKLFSRFATSFKDYF
KNRANCFSADDISSSSCHRIVNDNAEIFFSNALVYRRIVKSLSNDDINKISGDMKDSLKEMSLEEIYSYEKYGEFITQEGISFY
NDICGKVNSFMNLYCQKNKENKNLYKLQKLHKQILCIADTSYEVPYKFESDEEVYQSVNGELDNISSKHIVERLRKIGDNYNGY
NLDKIYIVSKFYESVSQKTYRDWETINTALEIHYNNILPGNGKSKADKVKKAVKNDLQKSITEINELVSNYKLCSDDNIKAETY
IHEISHILNNFEAQELKYNPEIHLVESELKASELKNVLDVIMNAFHWCSVFMTEELVDKDNNFYAELEEIYDEIYPVISLYNLV
RNYVTQKPYSTKKIKLNFGIPTLADGWSKSKEYSNNAIILMRDNLYYLGIFNAKNKPDKKIIEGNTSENKGDYKKMIYNLLPGP
NKMIPKVFLSSKTGVETYKPSAYILEGYKQNKHIKSSKDFDITFCHDLIDYFKNCIAIHPEWKNFGFDFSDTSTYEDISGFYRE
VELQGYKIDWTYISEKDIDLLQEKGQLYLFQIYNKDFSKKSTGNDNLHTMYLKNLFSEENLKDIVLKLNGEAEIFFRKSSIKNP
IIHKKGSILVNRTYEAEEKDQFGNIQIVRKNIPENIYQELYKYFNDKSDKELSDEAAKLKNVVGHHEAAFNIVKDYRYTYDKYF
LHMPITINFKANKTGFINDRILQYIAKEKDLHVIGIDRGERNLIYVSVIDTCGNIVEQKSFNIVNGYDYQIKLKQQEGARQIAR
KEWKEIGKIKEIKEGYLSLVIHEISKMVIKYNAIIAMEDLSYGFKKGRFKVERQVYQKFETMLINKLNYLVFKDISITENGGLL
KGYQLTYIPDKLKNVGHQCGCIFYVPAAYTSKIDPTTGFVNIFKFKDLTVDAKREFIKKEDSIRYDSEKNLFCFTFDYNNFITQ
NTVMSKSSWSVYTYGVRIKRRFVNGRFSNESDTIDITKDMEKTLEMTDINWRDGHDLRQDIIDYEIVQHIFEIFRLTVQMRNSL
SELEDRDYDRLISPVLNENNIFYDSAKAGDALPKDADANGAYCIALKGLYEIKQITENWKEDGKFSRDKLKISNKDWFDFIQNK
RYL
ErCas12a-S469K/K516P-NT (SEQ ID NO: 187)
atgAATAACGGTACCAATAACTTTCAAAATTTTATCGGGATCTCCTCGTTGCAAAAAACTCTTCGTAATGCTTTAATCCCGACT
GAGACAACACAGCAGTTCATCGTTAAAAACGGCATCATTAAAGAAGATGAGCTGCGCGGCGAGAACCGTCAGATTTTAAAGGAC
ATCATGGACGACTATTACCGTGGGTTCATCTCAGAAACATTAAGCAGCATCGATGATATCGACTGGACCTCACTGTTTGAGAAG
ATGGAGATTCAACTTAAGAATGGAGACAACAAAGACACTTTAATTAAGGAGCAGACGGAATATCGTAAAGCTATCCATAAAAAA
TTTGCAAACGATGACCGTTTCAAAAATATGTTTTCCGCAAAATTGATTAGCGACATTTTACCTGAATTCGTAATCCATAACAAC
AACTATTCCGCATCTGAAAAAGAGGAGAAGACCCAAGTTATCAAACTTTTTTCACGTTTCGCGACATCTTTTAAAGACTACTTT
AAGAATCGTGCGAATTGTTTCAGTGCAGATGATATTTCGTCTAGTTCATGTCACCGTATCGTGAATGACAACGCTGAGATTTTC
TTTTCTAATGCGTTGGTGTATCGCCGCATCGTAAAGTCCTTGTCGAATGATGATATCAACAAAATTAGTGGTGACATGAAAGAC
TCCCTGAAAGAAATGTCATTAGAGGAGATTTACAGCTACGAAAAATACGGAGAGTTCATCACTCAGGAAGGTATCTCCTTTTAC
AACGATATTTGCGGCAAAGTTAATAGTTTCATGAATCTGTATTGTCAGAAGAATAAGGAAAACAAGAATCTGTACAAGTTACAA
AAGCTTCATAAACAGATCTTGTGCATCGCCGACACGTCTTATGAAGTCCCGTATAAATTTGAAAGCGACGAAGAAGTATATCAG
AGTGTGAATGGATTCTTGGACAATATCTCATCAAAACACATTGTTGAACGTTTGCGCAAAATCGGCGACAACTATAACGGATAC
AACTTGGATAAAATTTATATCGTATCAAAATTTTATGAATCAGTATCCCAAAAGACTTACCGTGATTGGGAGACTATTAATACG
GCGTTAGAAATCCATTACAACAACATTCTGCCGGGTAACGGTAAATCGAAAGCGGACAAAGTGAAGAAGGCGGTTAAGAACGAT
CTTCAGAAGTCTATCACGGAGATTAATGAGCTGGTTTCCAATTACAAGTTGTGCTCGGATGATAACATCAAAGCTGAAACCTAT
ATCCATGAAATTTCTCATATTCTTAATAACTTCGAGGCACAAGAATTAAAATATAACCCAGAAATTCATCTGGTTGAGAGCGAA
CTTAAAGCTTCAGAATTAAAAAATGTTTTGGACGTAATTATGAACGCCTTCCATTGGTGCAAAGTGTTTATGACAGAGGAGTTA
GTAGATAAGGATAACAACTTTTATGCAGAATTGGAAGAGATCTATGATGAGATCTATCCAGTGATTTCACTGTATAACTTAGTC
CGTAATTACGTCACTCAGAAGCCGTACTCAACTCCGAAGATCAAGTTAAATTTTGGAATTCCGACATTGGCGGATGGTTGGAGT
AAGTCTAAGGAATACTCAAATAACGCTATTATCTTAATGCGTGACAACCTGTATTACTTGGGTATTTTCAATGCCAAAAATAAG
CCCGATAAAAAAATCATTGAAGGGAATACTTCAGAAAATAAGGGAGATTACAAAAAAATGATTTATAACCTTTTGCCAGGCCCA
AACAAAATGATCCCCAAGGTGTTTTTGAGTAGTAAGACGGGAGTAGAAACATATAAGCCATCAGCGTACATTCTTGAAGGGTAC
AAACAAAATAAACACATCAAGAGCAGCAAGGACTTTGACATTACATTTTGTCATGACTTAATCGACTACTTTAAAAATTGCATT
GCCATTCACCCTGAGTGGAAAAATTTTGGTTTCGACTTCAGTGATACCTCTACCTATGAAGATATCTCTGGTTTTTATCGTGAG
GTAGAACTTCAGGGTTACAAGATCGATTGGACGTACATTTCCGAGAAAGACATTGATCTTTTACAAGAGAAGGGTCAGCTTTAC
TTATTTCAGATCTACAATAAAGACTTTTCGAAAAAATCCACGGGCAACGACAACCTTCATACAATGTACTTAAAGAACCTGTTC
TCTGAAGAAAACTTGAAAGATATCGTGCTTAAATTGAATGGCGAGGCCGAGATTTTTTTCCGTAAAAGCTCGATTAAGAATCCC
ATCATCCACAAGAAAGGCAGCATTCTGGTAAATCGTACCTATGAAGCGGAGGAAAAGGACCAATTTGGTAATATTCAGATTGTC
CGTAAGAACATCCCTGAAAATATCTATCAAGAATTATATAAATATTTCAACGATAAGTCGGACAAGGAACTTAGCGATGAAGCC
GCGAAGTTGAAAAATGTTGTTGGTCACCACGAAGCAGCAACAAACATTGTGAAAGACTATCGCTACACTTACGATAAGTACTTT
TTACATATGCCTATTACGATTAACTTTAAGGCAAATAAGACAGGTTTTATCAACGACCGTATCCTGCAATATATTGCAAAAGAG
AAGGACCTGCATGTCATTGGGATTGATCGCGGTGAACGCAATCTGATTTACGTGAGTGTTATTGATACCTGCGGTAATATTGTT
GAGCAAAAGTCTTTTAATATCGTTAATGGTTACGACTACCAAATTAAGCTTAAACAACAGGAAGGTGCCCGCCAGATCGCCCGT
AAGGAGTGGAAGGAAATCGGAAAAATTAAGGAAATCAAAGAGGGATATCTGAGCTTGGTTATTCATGAAATCTCAAAGATGGTT
ATTAAGTACAACGCCATCATCGCTATGGAAGACTTATCGTATGGGTTTAAAAAGGGTCGTTTCAAAGTTGAGCGCCAGGTCTAC
CAAAAGTTTGAAACGATGCTTATTAATAAATTAAACTACTTGGTTTTCAAAGATATCTCTATTACCGAGAATGGAGGTTTACTG
AAAGGATACCAGTTAACGTATATCCCCGATAAGCTTAAAAACGTGGGCCATCAGTGTGGCTGTATTTTCTATGTGCCCGCGGCA
TATACATCAAAAATTGACCCGACGACGGGTTTCGTTAATATCTTCAAGTTCAAAGATCTGACAGTTGATGCAAAACGCGAATTC
ATTAAGAAGTTCGATAGTATTCGCTATGACTCCGAGAAAAATTTGTTTTGCTTCACTTTTGACTACAATAACTTTATTACTCAG
AATACAGTCATGAGTAAAAGCTCCTGGTCGGTTTACACGTACGGGGTACGCATCAAACGTCGTTTTGTGAATGGTCGTTTTAGT
AATGAGTCGGATACAATTGATATTACCAAGGATATGGAGAAGACTCTGGAAATGACAGACATCAATTGGCGTGATGGACATGAT
TTGCGTCAGGACATTATCGACTATGAGATTGTGCAGCATATTTTCGAAATTTTTCGCCTGACGGTGCAAATGCGTAATTCCTTA
AGCGAACTGGAAGATCGCGACTATGACCGCTTAATTTCTCCTGTGCTGAATGAGAACAACATCTTCTATGACTCAGCGAAAGCC
GGGGACGCTTTGCCAAAGGATGCAGATGCTAACGGTGCATATTGTATTGCTCTGAAAGGCCTTTACGAGATCAAACAAATTACT
GAAAACTGGAAGGAAGATGGAAAGTTTTCCCGTGATAAATTGAAGATCTCTAATAAGGACTGGTTTGACTTTATCCAAAATAAA
CGTTATTTA
ErCas12a-S469K/K516P-AA (SEQ ID NO: 188)
MNNGTNNFQNFIGISSLQKTLRNALIPTETTQQFIVKNGIIKEDELRGENRQILKDIMDDYYRGFISETLSSIDDIDWTSLFEK
MEIQLKNGDNKDTLIKEQTEYRKAIHKKFANDDRFKNMFSAKLISDILPEFVIHNNNYSASEKEEKTQVIKLFSRFATSFKDYF
KNRANCESADDISSSSCHRIVNDNAEIFFSNALVYRRIVKSLSNDDINKISGDMKDSLKEMSLEEIYSYEKYGEFITQEGISFY
NDICGKVNSFMNLYCQKNKENKNLYKLQKLHKQILCIADTSYEVPYKFESDEEVYQSVNGELDNISSKHIVERLRKIGDNYNGY
NLDKIYIVSKFYESVSQKTYRDWETINTALEIHYNNILPGNGKSKADKVKKAVKNDLQKSITEINELVSNYKLCSDDNIKAETY
IHEISHILNNFEAQELKYNPEIHLVESELKASELKNVLDVIMNAFHWCKVEMTEELVDKDNNFYAELEEIYDEIYPVISLYNLV
RNYVTQKPYSTPKIKLNFGIPTLADGWSKSKEYSNNAIILMRDNLYYLGIFNAKNKPDKKIIEGNTSENKGDYKKMIYNLLPGP
NKMIPKVFLSSKTGVETYKPSAYILEGYKQNKHIKSSKDFDITFCHDLIDYFKNCIAIHPEWKNFGFDFSDTSTYEDISGFYRE
VELQGYKIDWTYISEKDIDLLQEKGQLYLFQIYNKDFSKKSTGNDNLHTMYLKNLFSEENLKDIVLKLNGEAEIFFRKSSIKNP
IIHKKGSILVNRTYEAEEKDQFGNIQIVRKNIPENIYQELYKYFNDKSDKELSDEAAKLKNVVGHHEAATNIVKDYRYTYDKYF
LHMPITINFKANKTGFINDRILQYIAKEKDLHVIGIDRGERNLIYVSVIDTCGNIVEQKSFNIVNGYDYQIKLKQQEGARQIAR
KEWKEIGKIKEIKEGYLSLVIHEISKMVIKYNAIIAMEDLSYGFKKGRFKVERQVYQKFETMLINKLNYLVFKDISITENGGLL
KGYQLTYIPDKLKNVGHQCGCIFYVPAAYTSKIDPTTGFVNIFKFKDLTVDAKREFIKKFDSIRYDSEKNLFCFTFDYNNFITQ
NTVMSKSSWSVYTYGVRIKRRFVNGRFSNESDTIDITKDMEKTLEMTDINWRDGHDLRQDIIDYEIVQHIFEIFRLTVQMRNSL
SELEDRDYDRLISPVLNENNIFYDSAKAGDALPKDADANGAYCIALKGLYEIKQITENWKEDGKFSRDKLKISNKDWFDFIQNK
RYL
ErCas12a-S469K/T826F-NT (SEQ ID NO: 189)
atgAATAACGGTACCAATAACTTTCAAAATTTTATCGGGATCTCCTCGTTGCAAAAAACTCTTCGTAATGCTTTAATCCCGACT
GAGACAACACAGCAGTTCATCGTTAAAAACGGCATCATTAAAGAAGATGAGCTGCGCGGCGAGAACCGTCAGATTTTAAAGGAC
ATCATGGACGACTATTACCGTGGGTTCATCTCAGAAACATTAAGCAGCATCGATGATATCGACTGGACCTCACTGTTTGAGAAG
ATGGAGATTCAACTTAAGAATGGAGACAACAAAGACACTTTAATTAAGGAGCAGACGGAATATCGTAAAGCTATCCATAAAAAA
TTTGCAAACGATGACCGTTTCAAAAATATGTTTTCCGCAAAATTGATTAGCGACATTTTACCTGAATTCGTAATCCATAACAAC
AACTATTCCGCATCTGAAAAAGAGGAGAAGACCCAAGTTATCAAACTTTTTTCACGTTTCGCGACATCTTTTAAAGACTACTTT
AAGAATCGTGCGAATTGTTTCAGTGCAGATGATATTTCGTCTAGTTCATGTCACCGTATCGTGAATGACAACGCTGAGATTTTC
TTTTCTAATGCGTTGGTGTATCGCCGCATCGTAAAGTCCTTGTCGAATGATGATATCAACAAAATTAGTGGTGACATGAAAGAC
TCCCTGAAAGAAATGTCATTAGAGGAGATTTACAGCTACGAAAAATACGGAGAGTTCATCACTCAGGAAGGTATCTCCTTTTAC
AACGATATTTGCGGCAAAGTTAATAGTTTCATGAATCTGTATTGTCAGAAGAATAAGGAAAACAAGAATCTGTACAAGTTACAA
AAGCTTCATAAACAGATCTTGTGCATCGCCGACACGTCTTATGAAGTCCCGTATAAATTTGAAAGCGACGAAGAAGTATATCAG
AGTGTGAATGGATTCTTGGACAATATCTCATCAAAACACATTGTTGAACGTTTGCGCAAAATCGGCGACAACTATAACGGATAC
AACTTGGATAAAATTTATATCGTATCAAAATTTTATGAATCAGTATCCCAAAAGACTTACCGTGATTGGGAGACTATTAATACG
GCGTTAGAAATCCATTACAACAACATTCTGCCGGGTAACGGTAAATCGAAAGCGGACAAAGTGAAGAAGGCGGTTAAGAACGAT
CTTCAGAAGTCTATCACGGAGATTAATGAGCTGGTTTCCAATTACAAGTTGTGCTCGGATGATAACATCAAAGCTGAAACCTAT
ATCCATGAAATTTCTCATATTCTTAATAACTTCGAGGCACAAGAATTAAAATATAACCCAGAAATTCATCTGGTTGAGAGCGAA
CTTAAAGCTTCAGAATTAAAAAATGTTTTGGACGTAATTATGAACGCCTTCCATTGGTGCAAAGTGTTTATGACAGAGGAGTTA
GTAGATAAGGATAACAACTTTTATGCAGAATTGGAAGAGATCTATGATGAGATCTATCCAGTGATTTCACTGTATAACTTAGTC
CGTAATTACGTCACTCAGAAGCCGTACTCAACTAAAAAGATCAAGTTAAATTTTGGAATTCCGACATTGGCGGATGGTTGGAGT
AAGTCTAAGGAATACTCAAATAACGCTATTATCTTAATGCGTGACAACCTGTATTACTTGGGTATTTTCAATGCCAAAAATAAG
CCCGATAAAAAAATCATTGAAGGGAATACTTCAGAAAATAAGGGAGATTACAAAAAAATGATTTATAACCTTTTGCCAGGCCCA
AACAAAATGATCCCCAAGGTGTTTTTGAGTAGTAAGACGGGAGTAGAAACATATAAGCCATCAGCGTACATTCTTGAAGGGTAC
AAACAAAATAAACACATCAAGAGCAGCAAGGACTTTGACATTACATTTTGTCATGACTTAATCGACTACTTTAAAAATTGCATT
GCCATTCACCCTGAGTGGAAAAATTTTGGTTTCGACTTCAGTGATACCTCTACCTATGAAGATATCTCTGGTTTTTATCGTGAG
GTAGAACTTCAGGGTTACAAGATCGATTGGACGTACATTTCCGAGAAAGACATTGATCTTTTACAAGAGAAGGGTCAGCTTTAC
TTATTTCAGATCTACAATAAAGACTTTTCGAAAAAATCCACGGGCAACGACAACCTTCATACAATGTACTTAAAGAACCTGTTC
TCTGAAGAAAACTTGAAAGATATCGTGCTTAAATTGAATGGCGAGGCCGAGATTTTTTTCCGTAAAAGCTCGATTAAGAATCCC
ATCATCCACAAGAAAGGCAGCATTCTGGTAAATCGTACCTATGAAGCGGAGGAAAAGGACCAATTTGGTAATATTCAGATTGTC
CGTAAGAACATCCCTGAAAATATCTATCAAGAATTATATAAATATTTCAACGATAAGTCGGACAAGGAACTTAGCGATGAAGCC
GCGAAGTTGAAAAATGTTGTTGGTCACCACGAAGCAGCATTTAACATTGTGAAAGACTATCGCTACACTTACGATAAGTACTTT
TTACATATGCCTATTACGATTAACTTTAAGGCAAATAAGACAGGTTTTATCAACGACCGTATCCTGCAATATATTGCAAAAGAG
AAGGACCTGCATGTCATTGGGATTGATCGCGGTGAACGCAATCTGATTTACGTGAGTGTTATTGATACCTGCGGTAATATTGTT
GAGCAAAAGTCTTTTAATATCGTTAATGGTTACGACTACCAAATTAAGCTTAAACAACAGGAAGGTGCCCGCCAGATCGCCCGT
AAGGAGTGGAAGGAAATCGGAAAAATTAAGGAAATCAAAGAGGGATATCTGAGCTTGGTTATTCATGAAATCTCAAAGATGGTT
ATTAAGTACAACGCCATCATCGCTATGGAAGACTTATCGTATGGGTTTAAAAAGGGTCGTTTCAAAGTTGAGCGCCAGGTCTAC
CAAAAGTTTGAAACGATGCTTATTAATAAATTAAACTACTTGGTTTTCAAAGATATCTCTATTACCGAGAATGGAGGTTTACTG
AAAGGATACCAGTTAACGTATATCCCCGATAAGCTTAAAAACGTGGGCCATCAGTGTGGCTGTATTTTCTATGTGCCCGCGGCA
TATACATCAAAAATTGACCCGACGACGGGTTTCGTTAATATCTTCAAGTTCAAAGATCTGACAGTTGATGCAAAACGCGAATTC
ATTAAGAAGTTCGATAGTATTCGCTATGACTCCGAGAAAAATTTGTTTTGCTTCACTTTTGACTACAATAACTTTATTACTCAG
AATACAGTCATGAGTAAAAGCTCCTGGTCGGTTTACACGTACGGGGTACGCATCAAACGTCGTTTTGTGAATGGTCGTTTTAGT
AATGAGTCGGATACAATTGATATTACCAAGGATATGGAGAAGACTCTGGAAATGACAGACATCAATTGGCGTGATGGACATGAT
TTGCGTCAGGACATTATCGACTATGAGATTGTGCAGCATATTTTCGAAATTTTTCGCCTGACGGTGCAAATGCGTAATTCCTTA
AGCGAACTGGAAGATCGCGACTATGACCGCTTAATTTCTCCTGTGCTGAATGAGAACAACATCTTCTATGACTCAGCGAAAGCC
GGGGACGCTTTGCCAAAGGATGCAGATGCTAACGGTGCATATTGTATTGCTCTGAAAGGCCTTTACGAGATCAAACAAATTACT
GAAAACTGGAAGGAAGATGGAAAGTTTTCCCGTGATAAATTGAAGATCTCTAATAAGGACTGGTTTGACTTTATCCAAAATAAA
CGTTATTTA
ErCas12a-S469K/T826F-AA (SEQ ID NO: 190)
MNNGTNNFQNFIGISSLQKTLRNALIPTETTQQFIVKNGIIKEDELRGENRQILKDIMDDYYRGFISETLSSIDDIDWTSLFEK
MEIQLKNGDNKDTLIKEQTEYRKAIHKKFANDDRFKNMFSAKLISDILPEFVIHNNNYSASEKEEKTQVIKLESRFATSFKDYF
KNRANCFSADDISSSSCHRIVNDNAEIFFSNALVYRRIVKSLSNDDINKISGDMKDSLKEMSLEEIYSYEKYGEFITQEGISFY
NDICGKVNSFMNLYCQKNKENKNLYKLQKLHKQILCIADTSYEVPYKFESDEEVYQSVNGELDNISSKHIVERLRKIGDNYNGY
NLDKIYIVSKFYESVSQKTYRDWETINTALEIHYNNILPGNGKSKADKVKKAVKNDLQKSITEINELVSNYKLCSDDNIKAETY
IHEISHILNNFEAQELKYNPEIHLVESELKASELKNVLDVIMNAFHWCKVFMTEELVDKDNNFYAELEEIYDEIYPVISLYNLV
RNYVTQKPYSTKKIKLNFGIPTLADGWSKSKEYSNNAIILMRDNLYYLGIFNAKNKPDKKIIEGNTSENKGDYKKMIYNLLPGP
NKMIPKVFLSSKTGVETYKPSAYILEGYKQNKHIKSSKDFDITFCHDLIDYFKNCIAIHPEWKNFGFDFSDTSTYEDISGFYRE
VELQGYKIDWTYISEKDIDLLQEKGQLYLFQIYNKDFSKKSTGNDNLHTMYLKNLFSEENLKDIVLKLNGEAEIFFRKSSIKNP
IIHKKGSILVNRTYEAEEKDQFGNIQIVRKNIPENIYQELYKYFNDKSDKELSDEAAKLKNVVGHHEAAFNIVKDYRYTYDKYF
LHMPITINFKANKTGFINDRILQYIAKEKDLHVIGIDRGERNLIYVSVIDTCGNIVEQKSFNIVNGYDYQIKLKQQEGARQIAR
KEWKEIGKIKEIKEGYLSLVIHEISKMVIKYNAIIAMEDLSYGFKKGRFKVERQVYQKFETMLINKLNYLVFKDISITENGGLL
KGYQLTYIPDKLKNVGHQCGCIFYVPAAYTSKIDPTTGFVNIFKFKDLTVDAKREFIKKFDSIRYDSEKNLFCFTFDYNNFITQ
NTVMSKSSWSVYTYGVRIKRRFVNGRFSNESDTIDITKDMEKTLEMTDINWRDGHDLRQDIIDYEIVQHIFEIFRLTVQMRNSL
SELEDRDYDRLISPVLNENNIFYDSAKAGDALPKDADANGAYCIALKGLYEIKQITENWKEDGKFSRDKLKISNKDWFDFIQNK
RYL
ErCas12a-Y513G/Y832R-NT (SEQ ID NO: 191)
atgAATAACGGTACCAATAACTTTCAAAATTTTATCGGGATCTCCTCGTTGCAAAAAACTCTTCGTAATGCTTTAATCCCGACT
GAGACAACACAGCAGTTCATCGTTAAAAACGGCATCATTAAAGAAGATGAGCTGCGCGGCGAGAACCGTCAGATTTTAAAGGAC
ATCATGGACGACTATTACCGTGGGTTCATCTCAGAAACATTAAGCAGCATCGATGATATCGACTGGACCTCACTGTTTGAGAAG
ATGGAGATTCAACTTAAGAATGGAGACAACAAAGACACTTTAATTAAGGAGCAGACGGAATATCGTAAAGCTATCCATAAAAAA
TTTGCAAACGATGACCGTTTCAAAAATATGTTTTCCGCAAAATTGATTAGCGACATTTTACCTGAATTCGTAATCCATAACAAC
AACTATTCCGCATCTGAAAAAGAGGAGAAGACCCAAGTTATCAAACTTTTTTCACGTTTCGCGACATCTTTTAAAGACTACTTT
AAGAATCGTGCGAATTGTTTCAGTGCAGATGATATTTCGTCTAGTTCATGTCACCGTATCGTGAATGACAACGCTGAGATTTTC
TTTTCTAATGCGTTGGTGTATCGCCGCATCGTAAAGTCCTTGTCGAATGATGATATCAACAAAATTAGTGGTGACATGAAAGAC
TCCCTGAAAGAAATGTCATTAGAGGAGATTTACAGCTACGAAAAATACGGAGAGTTCATCACTCAGGAAGGTATCTCCTTTTAC
AACGATATTTGCGGCAAAGTTAATAGTTTCATGAATCTGTATTGTCAGAAGAATAAGGAAAACAAGAATCTGTACAAGTTACAA
AAGCTTCATAAACAGATCTTGTGCATCGCCGACACGTCTTATGAAGTCCCGTATAAATTTGAAAGCGACGAAGAAGTATATCAG
AGTGTGAATGGATTCTTGGACAATATCTCATCAAAACACATTGTTGAACGTTTGCGCAAAATCGGCGACAACTATAACGGATAC
AACTTGGATAAAATTTATATCGTATCAAAATTTTATGAATCAGTATCCCAAAAGACTTACCGTGATTGGGAGACTATTAATACG
GCGTTAGAAATCCATTACAACAACATTCTGCCGGGTAACGGTAAATCGAAAGCGGACAAAGTGAAGAAGGCGGTTAAGAACGAT
CTTCAGAAGTCTATCACGGAGATTAATGAGCTGGTTTCCAATTACAAGTTGTGCTCGGATGATAACATCAAAGCTGAAACCTAT
ATCCATGAAATTTCTCATATTCTTAATAACTTCGAGGCACAAGAATTAAAATATAACCCAGAAATTCATCTGGTTGAGAGCGAA
CTTAAAGCTTCAGAATTAAAAAATGTTTTGGACGTAATTATGAACGCCTTCCATTGGTGCAGCGTGTTTATGACAGAGGAGTTA
GTAGATAAGGATAACAACTTTTATGCAGAATTGGAAGAGATCTATGATGAGATCTATCCAGTGATTTCACTGTATAACTTAGTC
CGTAATTACGTCACTCAGAAGCCGGGCTCAACTAAAAAGATCAAGTTAAATTTTGGAATTCCGACATTGGCGGATGGTTGGAGT
AAGTCTAAGGAATACTCAAATAACGCTATTATCTTAATGCGTGACAACCTGTATTACTTGGGTATTTTCAATGCCAAAAATAAG
CCCGATAAAAAAATCATTGAAGGGAATACTTCAGAAAATAAGGGAGATTACAAAAAAATGATTTATAACCTTTTGCCAGGCCCA
AACAAAATGATCCCCAAGGTGTTTTTGAGTAGTAAGACGGGAGTAGAAACATATAAGCCATCAGCGTACATTCTTGAAGGGTAC
AAACAAAATAAACACATCAAGAGCAGCAAGGACTTTGACATTACATTTTGTCATGACTTAATCGACTACTTTAAAAATTGCATT
GCCATTCACCCTGAGTGGAAAAATTTTGGTTTCGACTTCAGTGATACCTCTACCTATGAAGATATCTCTGGTTTTTATCGTGAG
GTAGAACTTCAGGGTTACAAGATCGATTGGACGTACATTTCCGAGAAAGACATTGATCTTTTACAAGAGAAGGGTCAGCTTTAC
TTATTTCAGATCTACAATAAAGACTTTTCGAAAAAATCCACGGGCAACGACAACCTTCATACAATGTACTTAAAGAACCTGTTC
TCTGAAGAAAACTTGAAAGATATCGTGCTTAAATTGAATGGCGAGGCCGAGATTTTTTTCCGTAAAAGCTCGATTAAGAATCCC
ATCATCCACAAGAAAGGCAGCATTCTGGTAAATCGTACCTATGAAGCGGAGGAAAAGGACCAATTTGGTAATATTCAGATTGTC
CGTAAGAACATCCCTGAAAATATCTATCAAGAATTATATAAATATTTCAACGATAAGTCGGACAAGGAACTTAGCGATGAAGCC
GCGAAGTTGAAAAATGTTGTTGGTCACCACGAAGCAGCAACAAACATTGTGAAAGACCGTCGCTACACTTACGATAAGTACTTT
TTACATATGCCTATTACGATTAACTTTAAGGCAAATAAGACAGGTTTTATCAACGACCGTATCCTGCAATATATTGCAAAAGAG
AAGGACCTGCATGTCATTGGGATTGATCGCGGTGAACGCAATCTGATTTACGTGAGTGTTATTGATACCTGCGGTAATATTGTT
GAGCAAAAGTCTTTTAATATCGTTAATGGTTACGACTACCAAATTAAGCTTAAACAACAGGAAGGTGCCCGCCAGATCGCCCGT
AAGGAGTGGAAGGAAATCGGAAAAATTAAGGAAATCAAAGAGGGATATCTGAGCTTGGTTATTCATGAAATCTCAAAGATGGTT
ATTAAGTACAACGCCATCATCGCTATGGAAGACTTATCGTATGGGTTTAAAAAGGGTCGTTTCAAAGTTGAGCGCCAGGTCTAC
CAAAAGTTTGAAACGATGCTTATTAATAAATTAAACTACTTGGTTTTCAAAGATATCTCTATTACCGAGAATGGAGGTTTACTG
AAAGGATACCAGTTAACGTATATCCCCGATAAGCTTAAAAACGTGGGCCATCAGTGTGGCTGTATTTTCTATGTGCCCGCGGCA
TATACATCAAAAATTGACCCGACGACGGGTTTCGTTAATATCTTCAAGTTCAAAGATCTGACAGTTGATGCAAAACGCGAATTC
ATTAAGAAGTTCGATAGTATTCGCTATGACTCCGAGAAAAATTTGTTTTGCTTCACTTTTGACTACAATAACTTTATTACTCAG
AATACAGTCATGAGTAAAAGCTCCTGGTCGGTTTACACGTACGGGGTACGCATCAAACGTCGTTTTGTGAATGGTCGTTTTAGT
AATGAGTCGGATACAATTGATATTACCAAGGATATGGAGAAGACTCTGGAAATGACAGACATCAATTGGCGTGATGGACATGAT
TTGCGTCAGGACATTATCGACTATGAGATTGTGCAGCATATTTTCGAAATTTTTCGCCTGACGGTGCAAATGCGTAATTCCTTA
AGCGAACTGGAAGATCGCGACTATGACCGCTTAATTTCTCCTGTGCTGAATGAGAACAACATCTTCTATGACTCAGCGAAAGCC
GGGGACGCTTTGCCAAAGGATGCAGATGCTAACGGTGCATATTGTATTGCTCTGAAAGGCCTTTACGAGATCAAACAAATTACT
GAAAACTGGAAGGAAGATGGAAAGTTTTCCCGTGATAAATTGAAGATCTCTAATAAGGACTGGTTTGACTTTATCCAAAATAAA
CGTTATTTA
ErCas12a-Y513G/Y832R-AA (SEQ ID NO: 192)
MNNGTNNFQNFIGISSLQKTLRNALIPTETTQQFIVKNGIIKEDELRGENRQILKDIMDDYYRGFISETLSSIDDIDWTSLFEK
MEIQLKNGDNKDTLIKEQTEYRKAIHKKFANDDRFKNMFSAKLISDILPEFVIHNNNYSASEKEEKTQVIKLFSRFATSFKDYF
KNRANCESADDISSSSCHRIVNDNAEIFFSNALVYRRIVKSLSNDDINKISGDMKDSLKEMSLEEIYSYEKYGEFITQEGISFY
NDICGKVNSFMNLYCQKNKENKNLYKLQKLHKQILCIADTSYEVPYKFESDEEVYQSVNGELDNISSKHIVERLRKIGDNYNGY
NLDKIYIVSKFYESVSQKTYRDWETINTALEIHYNNILPGNGKSKADKVKKAVKNDLQKSITEINELVSNYKLCSDDNIKAETY
IHEISHILNNFEAQELKYNPEIHLVESELKASELKNVLDVIMNAFHWCSVFMTEELVDKDNNFYAELEEIYDEIYPVISLYNLV
RNYVTQKPGSTKKIKLNFGIPTLADGWSKSKEYSNNAIILMRDNLYYLGIFNAKNKPDKKIIEGNTSENKGDYKKMIYNLLPGP
NKMIPKVFLSSKTGVETYKPSAYILEGYKQNKHIKSSKDFDITFCHDLIDYFKNCIAIHPEWKNFGFDFSDTSTYEDISGFYRE
VELQGYKIDWTYISEKDIDLLQEKGQLYLFQIYNKDFSKKSTGNDNLHTMYLKNLFSEENLKDIVLKLNGEAEIFFRKSSIKNP
IIHKKGSILVNRTYEAEEKDQFGNIQIVRKNIPENIYQELYKYFNDKSDKELSDEAAKLKNVVGHHEAATNIVKDRRYTYDKYF
LHMPITINFKANKTGFINDRILQYIAKEKDLHVIGIDRGERNLIYVSVIDTCGNIVEQKSENIVNGYDYQIKLKQQEGARQIAR
KEWKEIGKIKEIKEGYLSLVIHEISKMVIKYNAIIAMEDLSYGFKKGRFKVERQVYQKFETMLINKLNYLVFKDISITENGGLL
KGYQLTYIPDKLKNVGHQCGCIFYVPAAYTSKIDPTTGFVNIFKFKDLTVDAKREFIKKFDSIRYDSEKNLFCFTEDYNNFITQ
NTVMSKSSWSVYTYGVRIKRRFVNGRFSNESDTIDITKDMEKTLEMTDINWRDGHDLRQDIIDYEIVQHIFEIFRLTVQMRNSL
SELEDRDYDRLISPVLNENNIFYDSAKAGDALPKDADANGAYCIALKGLYEIKQITENWKEDGKFSRDKLKISNKDWFDFIQNK
RYL
ErCas12a-Y513G/F840L-NT (SEQ ID NO: 193)
atgAATAACGGTACCAATAACTTTCAAAATTTTATCGGGATCTCCTCGTTGCAAAAAACTCTTCGTAATGCTTTAATCCCGACT
GAGACAACACAGCAGTTCATCGTTAAAAACGGCATCATTAAAGAAGATGAGCTGCGCGGCGAGAACCGTCAGATTTTAAAGGAC
ATCATGGACGACTATTACCGTGGGTTCATCTCAGAAACATTAAGCAGCATCGATGATATCGACTGGACCTCACTGTTTGAGAAG
ATGGAGATTCAACTTAAGAATGGAGACAACAAAGACACTTTAATTAAGGAGCAGACGGAATATCGTAAAGCTATCCATAAAAAA
TTTGCAAACGATGACCGTTTCAAAAATATGTTTTCCGCAAAATTGATTAGCGACATTTTACCTGAATTCGTAATCCATAACAAC
AACTATTCCGCATCTGAAAAAGAGGAGAAGACCCAAGTTATCAAACTTTTTTCACGTTTCGCGACATCTTTTAAAGACTACTTT
AAGAATCGTGCGAATTGTTTCAGTGCAGATGATATTTCGTCTAGTTCATGTCACCGTATCGTGAATGACAACGCTGAGATTTTC
TTTTCTAATGCGTTGGTGTATCGCCGCATCGTAAAGTCCTTGTCGAATGATGATATCAACAAAATTAGTGGTGACATGAAAGAC
TCCCTGAAAGAAATGTCATTAGAGGAGATTTACAGCTACGAAAAATACGGAGAGTTCATCACTCAGGAAGGTATCTCCTTTTAC
AACGATATTTGCGGCAAAGTTAATAGTTTCATGAATCTGTATTGTCAGAAGAATAAGGAAAACAAGAATCTGTACAAGTTACAA
AAGCTTCATAAACAGATCTTGTGCATCGCCGACACGTCTTATGAAGTCCCGTATAAATTTGAAAGCGACGAAGAAGTATATCAG
AGTGTGAATGGATTCTTGGACAATATCTCATCAAAACACATTGTTGAACGTTTGCGCAAAATCGGCGACAACTATAACGGATAC
AACTTGGATAAAATTTATATCGTATCAAAATTTTATGAATCAGTATCCCAAAAGACTTACCGTGATTGGGAGACTATTAATACG
GCGTTAGAAATCCATTACAACAACATTCTGCCGGGTAACGGTAAATCGAAAGCGGACAAAGTGAAGAAGGCGGTTAAGAACGAT
CTTCAGAAGTCTATCACGGAGATTAATGAGCTGGTTTCCAATTACAAGTTGTGCTCGGATGATAACATCAAAGCTGAAACCTAT
ATCCATGAAATTTCTCATATTCTTAATAACTTCGAGGCACAAGAATTAAAATATAACCCAGAAATTCATCTGGTTGAGAGCGAA
CTTAAAGCTTCAGAATTAAAAAATGTTTTGGACGTAATTATGAACGCCTTCCATTGGTGCAGCGTGTTTATGACAGAGGAGTTA
GTAGATAAGGATAACAACTTTTATGCAGAATTGGAAGAGATCTATGATGAGATCTATCCAGTGATTTCACTGTATAACTTAGTC
CGTAATTACGTCACTCAGAAGCCGGGCTCAACTAAAAAGATCAAGTTAAATTTTGGAATTCCGACATTGGCGGATGGTTGGAGT
AAGTCTAAGGAATACTCAAATAACGCTATTATCTTAATGCGTGACAACCTGTATTACTTGGGTATTTTCAATGCCAAAAATAAG
CCCGATAAAAAAATCATTGAAGGGAATACTTCAGAAAATAAGGGAGATTACAAAAAAATGATTTATAACCTTTTGCCAGGCCCA
AACAAAATGATCCCCAAGGTGTTTTTGAGTAGTAAGACGGGAGTAGAAACATATAAGCCATCAGCGTACATTCTTGAAGGGTAC
AAACAAAATAAACACATCAAGAGCAGCAAGGACTTTGACATTACATTTTGTCATGACTTAATCGACTACTTTAAAAATTGCATT
GCCATTCACCCTGAGTGGAAAAATTTTGGTTTCGACTTCAGTGATACCTCTACCTATGAAGATATCTCTGGTTTTTATCGTGAG
GTAGAACTTCAGGGTTACAAGATCGATTGGACGTACATTTCCGAGAAAGACATTGATCTTTTACAAGAGAAGGGTCAGCTTTAC
TTATTTCAGATCTACAATAAAGACTTTTCGAAAAAATCCACGGGCAACGACAACCTTCATACAATGTACTTAAAGAACCTGTTC
TCTGAAGAAAACTTGAAAGATATCGTGCTTAAATTGAATGGCGAGGCCGAGATTTTTTTCCGTAAAAGCTCGATTAAGAATCCC
ATCATCCACAAGAAAGGCAGCATTCTGGTAAATCGTACCTATGAAGCGGAGGAAAAGGACCAATTTGGTAATATTCAGATTGTC
CGTAAGAACATCCCTGAAAATATCTATCAAGAATTATATAAATATTTCAACGATAAGTCGGACAAGGAACTTAGCGATGAAGCC
GCGAAGTTGAAAAATGTTGTTGGTCACCACGAAGCAGCAACAAACATTGTGAAAGACTATCGCTACACTTACGATAAGTACCTG
TTACATATGCCTATTACGATTAACTTTAAGGCAAATAAGACAGGTTTTATCAACGACCGTATCCTGCAATATATTGCAAAAGAG
AAGGACCTGCATGTCATTGGGATTGATCGCGGTGAACGCAATCTGATTTACGTGAGTGTTATTGATACCTGCGGTAATATTGTT
GAGCAAAAGTCTTTTAATATCGTTAATGGTTACGACTACCAAATTAAGCTTAAACAACAGGAAGGTGCCCGCCAGATCGCCCGT
AAGGAGTGGAAGGAAATCGGAAAAATTAAGGAAATCAAAGAGGGATATCTGAGCTTGGTTATTCATGAAATCTCAAAGATGGTT
ATTAAGTACAACGCCATCATCGCTATGGAAGACTTATCGTATGGGTTTAAAAAGGGTCGTTTCAAAGTTGAGCGCCAGGTCTAC
CAAAAGTTTGAAACGATGCTTATTAATAAATTAAACTACTTGGTTTTCAAAGATATCTCTATTACCGAGAATGGAGGTTTACTG
AAAGGATACCAGTTAACGTATATCCCCGATAAGCTTAAAAACGTGGGCCATCAGTGTGGCTGTATTTTCTATGTGCCCGCGGCA
TATACATCAAAAATTGACCCGACGACGGGTTTCGTTAATATCTTCAAGTTCAAAGATCTGACAGTTGATGCAAAACGCGAATTC
ATTAAGAAGTTCGATAGTATTCGCTATGACTCCGAGAAAAATTTGTTTTGCTTCACTTTTGACTACAATAACTTTATTACTCAG
AATACAGTCATGAGTAAAAGCTCCTGGTCGGTTTACACGTACGGGGTACGCATCAAACGTCGTTTTGTGAATGGTCGTTTTAGT
AATGAGTCGGATACAATTGATATTACCAAGGATATGGAGAAGACTCTGGAAATGACAGACATCAATTGGCGTGATGGACATGAT
TTGCGTCAGGACATTATCGACTATGAGATTGTGCAGCATATTTTCGAAATTTTTCGCCTGACGGTGCAAATGCGTAATTCCTTA
AGCGAACTGGAAGATCGCGACTATGACCGCTTAATTTCTCCTGTGCTGAATGAGAACAACATCTTCTATGACTCAGCGAAAGCC
GGGGACGCTTTGCCAAAGGATGCAGATGCTAACGGTGCATATTGTATTGCTCTGAAAGGCCTTTACGAGATCAAACAAATTACT
GAAAACTGGAAGGAAGATGGAAAGTTTTCCCGTGATAAATTGAAGATCTCTAATAAGGACTGGTTTGACTTTATCCAAAATAAA
CGTTATTTA
ErCas12a-Y513G/F840L-AA (SEQ ID NO: 194)
MNNGTNNFQNFIGISSLQKTLRNALIPTETTQQFIVKNGIIKEDELRGENRQILKDIMDDYYRGFISETLSSIDDIDWTSLFEK
MEIQLKNGDNKDTLIKEQTEYRKAIHKKFANDDRFKNMFSAKLISDILPEFVIHNNNYSASEKEEKTQVIKLFSRFATSFKDYF
KNRANCFSADDISSSSCHRIVNDNAEIFFSNALVYRRIVKSLSNDDINKISGDMKDSLKEMSLEEIYSYEKYGEFITQEGISFY
NDICGKVNSFMNLYCQKNKENKNLYKLQKLHKQILCIADTSYEVPYKFESDEEVYQSVNGELDNISSKHIVERLRKIGDNYNGY
NLDKIYIVSKFYESVSQKTYRDWETINTALEIHYNNILPGNGKSKADKVKKAVKNDLQKSITEINELVSNYKLCSDDNIKAETY
IHEISHILNNFEAQELKYNPEIHLVESELKASELKNVLDVIMNAFHWCSVFMTEELVDKDNNFYAELEEIYDEIYPVISLYNLV
RNYVTQKPGSTKKIKLNFGIPTLADGWSKSKEYSNNAIILMRDNLYYLGIFNAKNKPDKKIIEGNTSENKGDYKKMIYNLLPGP
NKMIPKVFLSSKTGVETYKPSAYILEGYKQNKHIKSSKDFDITFCHDLIDYFKNCIAIHPEWKNFGFDESDTSTYEDISGFYRE
VELQGYKIDWTYISEKDIDLLQEKGQLYLFQIYNKDFSKKSTGNDNLHTMYLKNLFSEENLKDIVLKLNGEAEIFFRKSSIKNP
IIHKKGSILVNRTYEAEEKDQFGNIQIVRKNIPENIYQELYKYFNDKSDKELSDEAAKLKNVVGHHEAATNIVKDYRYTYDKYL
LHMPITINFKANKTGFINDRILQYIAKEKDLHVIGIDRGERNLIYVSVIDTCGNIVEQKSFNIVNGYDYQIKLKQQEGARQIAR
KEWKEIGKIKEIKEGYLSLVIHEISKMVIKYNAIIAMEDLSYGFKKGRFKVERQVYQKFETMLINKLNYLVFKDISITENGGLL
KGYQLTYIPDKLKNVGHQCGCIFYVPAAYTSKIDPTTGFVNIFKFKDLTVDAKREFIKKFDSIRYDSEKNLFCFTEDYNNFITQ
NTVMSKSSWSVYTYGVRIKRRFVNGRFSNESDTIDITKDMEKTLEMTDINWRDGHDLRQDIIDYEIVQHIFEIFRLTVQMRNSL
SELEDRDYDRLISPVLNENNIFYDSAKAGDALPKDADANGAYCIALKGLYEIKQITENWKEDGKFSRDKLKISNKDWFDFIQNK
RYL
ErCas12a-I35L/S469K/T826F-NT (SEQ ID NO: 195)
atgAATAACGGTACCAATAACTTTCAAAATTTTATCGGGATCTCCTCGTTGCAAAAAACTCTTCGTAATGCTTTAATCCCGACT
GAGACAACACAGCAGTTCCTGGTTAAAAACGGCATCATTAAAGAAGATGAGCTGCGCGGCGAGAACCGTCAGATTTTAAAGGAC
ATCATGGACGACTATTACCGTGGGTTCATCTCAGAAACATTAAGCAGCATCGATGATATCGACTGGACCTCACTGTTTGAGAAG
ATGGAGATTCAACTTAAGAATGGAGACAACAAAGACACTTTAATTAAGGAGCAGACGGAATATCGTAAAGCTATCCATAAAAAA
TTTGCAAACGATGACCGTTTCAAAAATATGTTTTCCGCAAAATTGATTAGCGACATTTTACCTGAATTCGTAATCCATAACAAC
AACTATTCCGCATCTGAAAAAGAGGAGAAGACCCAAGTTATCAAACTTTTTTCACGTTTCGCGACATCTTTTAAAGACTACTTT
AAGAATCGTGCGAATTGTTTCAGTGCAGATGATATTTCGTCTAGTTCATGTCACCGTATCGTGAATGACAACGCTGAGATTTTC
TTTTCTAATGCGTTGGTGTATCGCCGCATCGTAAAGTCCTTGTCGAATGATGATATCAACAAAATTAGTGGTGACATGAAAGAC
TCCCTGAAAGAAATGTCATTAGAGGAGATTTACAGCTACGAAAAATACGGAGAGTTCATCACTCAGGAAGGTATCTCCTTTTAC
AACGATATTTGCGGCAAAGTTAATAGTTTCATGAATCTGTATTGTCAGAAGAATAAGGAAAACAAGAATCTGTACAAGTTACAA
AAGCTTCATAAACAGATCTTGTGCATCGCCGACACGTCTTATGAAGTCCCGTATAAATTTGAAAGCGACGAAGAAGTATATCAG
AGTGTGAATGGATTCTTGGACAATATCTCATCAAAACACATTGTTGAACGTTTGCGCAAAATCGGCGACAACTATAACGGATAC
AACTTGGATAAAATTTATATCGTATCAAAATTTTATGAATCAGTATCCCAAAAGACTTACCGTGATTGGGAGACTATTAATACG
GCGTTAGAAATCCATTACAACAACATTCTGCCGGGTAACGGTAAATCGAAAGCGGACAAAGTGAAGAAGGCGGTTAAGAACGAT
CTTCAGAAGTCTATCACGGAGATTAATGAGCTGGTTTCCAATTACAAGTTGTGCTCGGATGATAACATCAAAGCTGAAACCTAT
ATCCATGAAATTTCTCATATTCTTAATAACTTCGAGGCACAAGAATTAAAATATAACCCAGAAATTCATCTGGTTGAGAGCGAA
CTTAAAGCTTCAGAATTAAAAAATGTTTTGGACGTAATTATGAACGCCTTCCATTGGTGCAAAGTGTTTATGACAGAGGAGTTA
GTAGATAAGGATAACAACTTTTATGCAGAATTGGAAGAGATCTATGATGAGATCTATCCAGTGATTTCACTGTATAACTTAGTC
CGTAATTACGTCACTCAGAAGCCGTACTCAACTAAAAAGATCAAGTTAAATTTTGGAATTCCGACATTGGCGGATGGTTGGAGT
AAGTCTAAGGAATACTCAAATAACGCTATTATCTTAATGCGTGACAACCTGTATTACTTGGGTATTTTCAATGCCAAAAATAAG
CCCGATAAAAAAATCATTGAAGGGAATACTTCAGAAAATAAGGGAGATTACAAAAAAATGATTTATAACCTTTTGCCAGGCCCA
AACAAAATGATCCCCAAGGTGTTTTTGAGTAGTAAGACGGGAGTAGAAACATATAAGCCATCAGCGTACATTCTTGAAGGGTAC
AAACAAAATAAACACATCAAGAGCAGCAAGGACTTTGACATTACATTTTGTCATGACTTAATCGACTACTTTAAAAATTGCATT
GCCATTCACCCTGAGTGGAAAAATTTTGGTTTCGACTTCAGTGATACCTCTACCTATGAAGATATCTCTGGTTTTTATCGTGAG
GTAGAACTTCAGGGTTACAAGATCGATTGGACGTACATTTCCGAGAAAGACATTGATCTTTTACAAGAGAAGGGTCAGCTTTAC
TTATTTCAGATCTACAATAAAGACTTTTCGAAAAAATCCACGGGCAACGACAACCTTCATACAATGTACTTAAAGAACCTGTTC
TCTGAAGAAAACTTGAAAGATATCGTGCTTAAATTGAATGGCGAGGCCGAGATTTTTTTCCGTAAAAGCTCGATTAAGAATCCC
ATCATCCACAAGAAAGGCAGCATTCTGGTAAATCGTACCTATGAAGCGGAGGAAAAGGACCAATTTGGTAATATTCAGATTGTC
CGTAAGAACATCCCTGAAAATATCTATCAAGAATTATATAAATATTTCAACGATAAGTCGGACAAGGAACTTAGCGATGAAGCC
GCGAAGTTGAAAAATGTTGTTGGTCACCACGAAGCAGCATTTAACATTGTGAAAGACTATCGCTACACTTACGATAAGTACTTT
TTACATATGCCTATTACGATTAACTTTAAGGCAAATAAGACAGGTTTTATCAACGACCGTATCCTGCAATATATTGCAAAAGAG
AAGGACCTGCATGTCATTGGGATTGATCGCGGTGAACGCAATCTGATTTACGTGAGTGTTATTGATACCTGCGGTAATATTGTT
GAGCAAAAGTCTTTTAATATCGTTAATGGTTACGACTACCAAATTAAGCTTAAACAACAGGAAGGTGCCCGCCAGATCGCCCGT
AAGGAGTGGAAGGAAATCGGAAAAATTAAGGAAATCAAAGAGGGATATCTGAGCTTGGTTATTCATGAAATCTCAAAGATGGTT
ATTAAGTACAACGCCATCATCGCTATGGAAGACTTATCGTATGGGTTTAAAAAGGGTCGTTTCAAAGTTGAGCGCCAGGTCTAC
CAAAAGTTTGAAACGATGCTTATTAATAAATTAAACTACTTGGTTTTCAAAGATATCTCTATTACCGAGAATGGAGGTTTACTG
AAAGGATACCAGTTAACGTATATCCCCGATAAGCTTAAAAACGTGGGCCATCAGTGTGGCTGTATTTTCTATGTGCCCGCGGCA
TATACATCAAAAATTGACCCGACGACGGGTTTCGTTAATATCTTCAAGTTCAAAGATCTGACAGTTGATGCAAAACGCGAATTC
ATTAAGAAGTTCGATAGTATTCGCTATGACTCCGAGAAAAATTTGTTTTGCTTCACTTTTGACTACAATAACTTTATTACTCAG
AATACAGTCATGAGTAAAAGCTCCTGGTCGGTTTACACGTACGGGGTACGCATCAAACGTCGTTTTGTGAATGGTCGTTTTAGT
AATGAGTCGGATACAATTGATATTACCAAGGATATGGAGAAGACTCTGGAAATGACAGACATCAATTGGCGTGATGGACATGAT
TTGCGTCAGGACATTATCGACTATGAGATTGTGCAGCATATTTTCGAAATTTTTCGCCTGACGGTGCAAATGCGTAATTCCTTA
AGCGAACTGGAAGATCGCGACTATGACCGCTTAATTTCTCCTGTGCTGAATGAGAACAACATCTTCTATGACTCAGCGAAAGCC
GGGGACGCTTTGCCAAAGGATGCAGATGCTAACGGTGCATATTGTATTGCTCTGAAAGGCCTTTACGAGATCAAACAAATTACT
GAAAACTGGAAGGAAGATGGAAAGTTTTCCCGTGATAAATTGAAGATCTCTAATAAGGACTGGTTTGACTTTATCCAAAATAAA
CGTTATTTA
ErCas12a-I35L/S469K/T826F-AA (SEQ ID NO: 196)
MNNGTNNFQNFIGISSLQKTLRNALIPTETTQQFIVKNGIIKEDELRGENRQILKDIMDDYYRGFISETLSSIDDIDWTSLFEK
MEIQLKNGDNKDTLIKEQTEYRKAIHKKFANDDRFKNMFSAKLISDILPEFVIHNNNYSASEKEEKTQVIKLESRFATSFKDYF
KNRANCFSADDISSSSCHRIVNDNAEIFFSNALVYRRIVKSLSNDDINKISGDMKDSLKEMSLEEIYSYEKYGEFITQEGISFY
NDICGKVNSFMNLYCQKNKENKNLYKLQKLHKQILCIADTSYEVPYKFESDEEVYQSVNGELDNISSKHIVERLRKIGDNYNGY
NLDKIYIVSKFYESVSQKTYRDWETINTALEIHYNNILPGNGKSKADKVKKAVKNDLQKSITEINELVSNYKLCSDDNIKAETY
IHEISHILNNFEAQELKYNPEIHLVESELKASELKNVLDVIMNAFHWCKVFMTEELVDKDNNFYAELEEIYDEIYPVISLYNLV
RNYVTQKPYSTKKIKLNFGIPTLADGWSKSKEYSNNAIILMRDNLYYLGIFNAKNKPDKKIIEGNTSENKGDYKKMIYNLLPGP
NKMIPKVFLSSKTGVETYKPSAYILEGYKQNKHIKSSKDFDITFCHDLIDYFKNCIAIHPEWKNFGFDFSDTSTYEDISGFYRE
VELQGYKIDWTYISEKDIDLLQEKGQLYLFQIYNKDFSKKSTGNDNLHTMYLKNLFSEENLKDIVLKLNGEAEIFFRKSSIKNP
IIHKKGSILVNRTYEAEEKDQFGNIQIVRKNIPENIYQELYKYFNDKSDKELSDEAAKLKNVVGHHEAAFNIVKDYRYTYDKYF
LHMPITINFKANKTGFINDRILQYIAKEKDLHVIGIDRGERNLIYVSVIDTCGNIVEQKSFNIVNGYDYQIKLKQQEGARQIAR
KEWKEIGKIKEIKEGYLSLVIHEISKMVIKYNAIIAMEDLSYGFKKGRFKVERQVYQKFETMLINKLNYLVFKDISITENGGLL
KGYQLTYIPDKLKNVGHQCGCIFYVPAAYTSKIDPTTGFVNIFKFKDLTVDAKREFIKKFDSIRYDSEKNLFCFTFDYNNFITQ
NTVMSKSSWSVYTYGVRIKRRFVNGRFSNESDTIDITKDMEKTLEMTDINWRDGHDLRQDIIDYEIVQHIFEIFRLTVQMRNSL
SELEDRDYDRLISPVLNENNIFYDSAKAGDALPKDADANGAYCIALKGLYEIKQITENWKEDGKFSRDKLKISNKDWFDFIQNK
RYL
ErCas12a-I40Q/S469K/T826F-NT (SEQ ID NO: 197)
atgAATAACGGTACCAATAACTTTCAAAATTTTATCGGGATCTCCTCGTTGCAAAAAACTCTTCGTAATGCTTTAATCCCGACT
GAGACAACACAGCAGTTCATCGTTAAAAACGGCCAGATTAAAGAAGATGAGCTGCGCGGCGAGAACCGTCAGATTTTAAAGGAC
ATCATGGACGACTATTACCGTGGGTTCATCTCAGAAACATTAAGCAGCATCGATGATATCGACTGGACCTCACTGTTTGAGAAG
ATGGAGATTCAACTTAAGAATGGAGACAACAAAGACACTTTAATTAAGGAGCAGACGGAATATCGTAAAGCTATCCATAAAAAA
TTTGCAAACGATGACCGTTTCAAAAATATGTTTTCCGCAAAATTGATTAGCGACATTTTACCTGAATTCGTAATCCATAACAAC
AACTATTCCGCATCTGAAAAAGAGGAGAAGACCCAAGTTATCAAACTTTTTTCACGTTTCGCGACATCTTTTAAAGACTACTTT
AAGAATCGTGCGAATTGTTTCAGTGCAGATGATATTTCGTCTAGTTCATGTCACCGTATCGTGAATGACAACGCTGAGATTTTC
TTTTCTAATGCGTTGGTGTATCGCCGCATCGTAAAGTCCTTGTCGAATGATGATATCAACAAAATTAGTGGTGACATGAAAGAC
TCCCTGAAAGAAATGTCATTAGAGGAGATTTACAGCTACGAAAAATACGGAGAGTTCATCACTCAGGAAGGTATCTCCTTTTAC
AACGATATTTGCGGCAAAGTTAATAGTTTCATGAATCTGTATTGTCAGAAGAATAAGGAAAACAAGAATCTGTACAAGTTACAA
AAGCTTCATAAACAGATCTTGTGCATCGCCGACACGTCTTATGAAGTCCCGTATAAATTTGAAAGCGACGAAGAAGTATATCAG
AGTGTGAATGGATTCTTGGACAATATCTCATCAAAACACATTGTTGAACGTTTGCGCAAAATCGGCGACAACTATAACGGATAC
AACTTGGATAAAATTTATATCGTATCAAAATTTTATGAATCAGTATCCCAAAAGACTTACCGTGATTGGGAGACTATTAATACG
GCGTTAGAAATCCATTACAACAACATTCTGCCGGGTAACGGTAAATCGAAAGCGGACAAAGTGAAGAAGGCGGTTAAGAACGAT
CTTCAGAAGTCTATCACGGAGATTAATGAGCTGGTTTCCAATTACAAGTTGTGCTCGGATGATAACATCAAAGCTGAAACCTAT
ATCCATGAAATTTCTCATATTCTTAATAACTTCGAGGCACAAGAATTAAAATATAACCCAGAAATTCATCTGGTTGAGAGCGAA
CTTAAAGCTTCAGAATTAAAAAATGTTTTGGACGTAATTATGAACGCCTTCCATTGGTGCAAAGTGTTTATGACAGAGGAGTTA
GTAGATAAGGATAACAACTTTTATGCAGAATTGGAAGAGATCTATGATGAGATCTATCCAGTGATTTCACTGTATAACTTAGTC
CGTAATTACGTCACTCAGAAGCCGTACTCAACTAAAAAGATCAAGTTAAATTTTGGAATTCCGACATTGGCGGATGGTTGGAGT
AAGTCTAAGGAATACTCAAATAACGCTATTATCTTAATGCGTGACAACCTGTATTACTTGGGTATTTTCAATGCCAAAAATAAG
CCCGATAAAAAAATCATTGAAGGGAATACTTCAGAAAATAAGGGAGATTACAAAAAAATGATTTATAACCTTTTGCCAGGCCCA
AACAAAATGATCCCCAAGGTGTTTTTGAGTAGTAAGACGGGAGTAGAAACATATAAGCCATCAGCGTACATTCTTGAAGGGTAC
AAACAAAATAAACACATCAAGAGCAGCAAGGACTTTGACATTACATTTTGTCATGACTTAATCGACTACTTTAAAAATTGCATT
GCCATTCACCCTGAGTGGAAAAATTTTGGTTTCGACTTCAGTGATACCTCTACCTATGAAGATATCTCTGGTTTTTATCGTGAG
GTAGAACTTCAGGGTTACAAGATCGATTGGACGTACATTTCCGAGAAAGACATTGATCTTTTACAAGAGAAGGGTCAGCTTTAC
TTATTTCAGATCTACAATAAAGACTTTTCGAAAAAATCCACGGGCAACGACAACCTTCATACAATGTACTTAAAGAACCTGTTC
TCTGAAGAAAACTTGAAAGATATCGTGCTTAAATTGAATGGCGAGGCCGAGATTTTTTTCCGTAAAAGCTCGATTAAGAATCCC
ATCATCCACAAGAAAGGCAGCATTCTGGTAAATCGTACCTATGAAGCGGAGGAAAAGGACCAATTTGGTAATATTCAGATTGTC
CGTAAGAACATCCCTGAAAATATCTATCAAGAATTATATAAATATTTCAACGATAAGTCGGACAAGGAACTTAGCGATGAAGCC
GCGAAGTTGAAAAATGTTGTTGGTCACCACGAAGCAGCATTTAACATTGTGAAAGACTATCGCTACACTTACGATAAGTACTTT
TTACATATGCCTATTACGATTAACTTTAAGGCAAATAAGACAGGTTTTATCAACGACCGTATCCTGCAATATATTGCAAAAGAG
AAGGACCTGCATGTCATTGGGATTGATCGCGGTGAACGCAATCTGATTTACGTGAGTGTTATTGATACCTGCGGTAATATTGTT
GAGCAAAAGTCTTTTAATATCGTTAATGGTTACGACTACCAAATTAAGCTTAAACAACAGGAAGGTGCCCGCCAGATCGCCCGT
AAGGAGTGGAAGGAAATCGGAAAAATTAAGGAAATCAAAGAGGGATATCTGAGCTTGGTTATTCATGAAATCTCAAAGATGGTT
ATTAAGTACAACGCCATCATCGCTATGGAAGACTTATCGTATGGGTTTAAAAAGGGTCGTTTCAAAGTTGAGCGCCAGGTCTAC
CAAAAGTTTGAAACGATGCTTATTAATAAATTAAACTACTTGGTTTTCAAAGATATCTCTATTACCGAGAATGGAGGTTTACTG
AAAGGATACCAGTTAACGTATATCCCCGATAAGCTTAAAAACGTGGGCCATCAGTGTGGCTGTATTTTCTATGTGCCCGCGGCA
TATACATCAAAAATTGACCCGACGACGGGTTTCGTTAATATCTTCAAGTTCAAAGATCTGACAGTTGATGCAAAACGCGAATTC
ATTAAGAAGTTCGATAGTATTCGCTATGACTCCGAGAAAAATTTGTTTTGCTTCACTTTTGACTACAATAACTTTATTACTCAG
AATACAGTCATGAGTAAAAGCTCCTGGTCGGTTTACACGTACGGGGTACGCATCAAACGTCGTTTTGTGAATGGTCGTTTTAGT
AATGAGTCGGATACAATTGATATTACCAAGGATATGGAGAAGACTCTGGAAATGACAGACATCAATTGGCGTGATGGACATGAT
TTGCGTCAGGACATTATCGACTATGAGATTGTGCAGCATATTTTCGAAATTTTTCGCCTGACGGTGCAAATGCGTAATTCCTTA
AGCGAACTGGAAGATCGCGACTATGACCGCTTAATTTCTCCTGTGCTGAATGAGAACAACATCTTCTATGACTCAGCGAAAGCC
GGGGACGCTTTGCCAAAGGATGCAGATGCTAACGGTGCATATTGTATTGCTCTGAAAGGCCTTTACGAGATCAAACAAATTACT
GAAAACTGGAAGGAAGATGGAAAGTTTTCCCGTGATAAATTGAAGATCTCTAATAAGGACTGGTTTGACTTTATCCAAAATAAA
CGTTATTTA
ErCas12a-I40Q/S469K/T826F-AA (SEQ ID NO: 198)
MNNGTNNFQNFIGISSLQKTLRNALIPTETTQQFIVKNGQIKEDELRGENRQILKDIMDDYYRGFISETLSSIDDIDWTSLFEK
MEIQLKNGDNKDTLIKEQTEYRKAIHKKFANDDRFKNMFSAKLISDILPEFVIHNNNYSASEKEEKTQVIKLESRFATSFKDYF
KNRANCESADDISSSSCHRIVNDNAEIFFSNALVYRRIVKSLSNDDINKISGDMKDSLKEMSLEEIYSYEKYGEFITQEGISFY
NDICGKVNSFMNLYCQKNKENKNLYKLQKLHKQILCIADTSYEVPYKFESDEEVYQSVNGELDNISSKHIVERLRKIGDNYNGY
NLDKIYIVSKFYESVSQKTYRDWETINTALEIHYNNILPGNGKSKADKVKKAVKNDLQKSITEINELVSNYKLCSDDNIKAETY
IHEISHILNNFEAQELKYNPEIHLVESELKASELKNVLDVIMNAFHWCKVFMTEELVDKDNNFYAELEEIYDEIYPVISLYNLV
RNYVTQKPYSTKKIKLNFGIPTLADGWSKSKEYSNNAIILMRDNLYYLGIFNAKNKPDKKIIEGNTSENKGDYKKMIYNLLPGP
NKMIPKVFLSSKTGVETYKPSAYILEGYKQNKHIKSSKDFDITFCHDLIDYFKNCIAIHPEWKNFGFDFSDTSTYEDISGFYRE
VELQGYKIDWTYISEKDIDLLQEKGQLYLFQIYNKDFSKKSTGNDNLHTMYLKNLFSEENLKDIVLKLNGEAEIFFRKSSIKNP
IIHKKGSILVNRTYEAEEKDQFGNIQIVRKNIPENIYQELYKYFNDKSDKELSDEAAKLKNVVGHHEAAFNIVKDYRYTYDKYF
LHMPITINFKANKTGFINDRILQYIAKEKDLHVIGIDRGERNLIYVSVIDTCGNIVEQKSFNIVNGYDYQIKLKQQEGARQIAR
KEWKEIGKIKEIKEGYLSLVIHEISKMVIKYNAIIAMEDLSYGFKKGRFKVERQVYQKFETMLINKLNYLVFKDISITENGGLL
KGYQLTYIPDKLKNVGHQCGCIFYVPAAYTSKIDPTTGFVNIFKFKDLTVDAKREFIKKFDSIRYDSEKNLFCFTFDYNNFITQ
NTVMSKSSWSVYTYGVRIKRRFVNGRFSNESDTIDITKDMEKTLEMTDINWRDGHDLRQDIIDYEIVQHIFEIFRLTVQMRNSL
SELEDRDYDRLISPVLNENNIFYDSAKAGDALPKDADANGAYCIALKGLYEIKQITENWKEDGKFSRDKLKISNKDWEDFIQNK
RYL
ErCas12a-S469K/K516P/T826F-NT (SEQ ID NO: 199)
atgAATAACGGTACCAATAACTTTCAAAATTTTATCGGGATCTCCTCGTTGCAAAAAACTCTTCGTAATGCTTTAATCCCGACT
GAGACAACACAGCAGTTCATCGTTAAAAACGGCATCATTAAAGAAGATGAGCTGCGCGGCGAGAACCGTCAGATTTTAAAGGAC
ATCATGGACGACTATTACCGTGGGTTCATCTCAGAAACATTAAGCAGCATCGATGATATCGACTGGACCTCACTGTTTGAGAAG
ATGGAGATTCAACTTAAGAATGGAGACAACAAAGACACTTTAATTAAGGAGCAGACGGAATATCGTAAAGCTATCCATAAAAAA
TTTGCAAACGATGACCGTTTCAAAAATATGTTTTCCGCAAAATTGATTAGCGACATTTTACCTGAATTCGTAATCCATAACAAC
AACTATTCCGCATCTGAAAAAGAGGAGAAGACCCAAGTTATCAAACTTTTTTCACGTTTCGCGACATCTTTTAAAGACTACTTT
AAGAATCGTGCGAATTGTTTCAGTGCAGATGATATTTCGTCTAGTTCATGTCACCGTATCGTGAATGACAACGCTGAGATTTTC
TTTTCTAATGCGTTGGTGTATCGCCGCATCGTAAAGTCCTTGTCGAATGATGATATCAACAAAATTAGTGGTGACATGAAAGAC
TCCCTGAAAGAAATGTCATTAGAGGAGATTTACAGCTACGAAAAATACGGAGAGTTCATCACTCAGGAAGGTATCTCCTTTTAC
AACGATATTTGCGGCAAAGTTAATAGTTTCATGAATCTGTATTGTCAGAAGAATAAGGAAAACAAGAATCTGTACAAGTTACAA
AAGCTTCATAAACAGATCTTGTGCATCGCCGACACGTCTTATGAAGTCCCGTATAAATTTGAAAGCGACGAAGAAGTATATCAG
AGTGTGAATGGATTCTTGGACAATATCTCATCAAAACACATTGTTGAACGTTTGCGCAAAATCGGCGACAACTATAACGGATAC
AACTTGGATAAAATTTATATCGTATCAAAATTTTATGAATCAGTATCCCAAAAGACTTACCGTGATTGGGAGACTATTAATACG
GCGTTAGAAATCCATTACAACAACATTCTGCCGGGTAACGGTAAATCGAAAGCGGACAAAGTGAAGAAGGCGGTTAAGAACGAT
CTTCAGAAGTCTATCACGGAGATTAATGAGCTGGTTTCCAATTACAAGTTGTGCTCGGATGATAACATCAAAGCTGAAACCTAT
ATCCATGAAATTTCTCATATTCTTAATAACTTCGAGGCACAAGAATTAAAATATAACCCAGAAATTCATCTGGTTGAGAGCGAA
CTTAAAGCTTCAGAATTAAAAAATGTTTTGGACGTAATTATGAACGCCTTCCATTGGTGCAAAGTGTTTATGACAGAGGAGTTA
GTAGATAAGGATAACAACTTTTATGCAGAATTGGAAGAGATCTATGATGAGATCTATCCAGTGATTTCACTGTATAACTTAGTC
CGTAATTACGTCACTCAGAAGCCGTACTCAACTCCGAAGATCAAGTTAAATTTTGGAATTCCGACATTGGCGGATGGTTGGAGT
AAGTCTAAGGAATACTCAAATAACGCTATTATCTTAATGCGTGACAACCTGTATTACTTGGGTATTTTCAATGCCAAAAATAAG
CCCGATAAAAAAATCATTGAAGGGAATACTTCAGAAAATAAGGGAGATTACAAAAAAATGATTTATAACCTTTTGCCAGGCCCA
AACAAAATGATCCCCAAGGTGTTTTTGAGTAGTAAGACGGGAGTAGAAACATATAAGCCATCAGCGTACATTCTTGAAGGGTAC
AAACAAAATAAACACATCAAGAGCAGCAAGGACTTTGACATTACATTTTGTCATGACTTAATCGACTACTTTAAAAATTGCATT
GCCATTCACCCTGAGTGGAAAAATTTTGGTTTCGACTTCAGTGATACCTCTACCTATGAAGATATCTCTGGTTTTTATCGTGAG
GTAGAACTTCAGGGTTACAAGATCGATTGGACGTACATTTCCGAGAAAGACATTGATCTTTTACAAGAGAAGGGTCAGCTTTAC
TTATTTCAGATCTACAATAAAGACTTTTCGAAAAAATCCACGGGCAACGACAACCTTCATACAATGTACTTAAAGAACCTGTTC
TCTGAAGAAAACTTGAAAGATATCGTGCTTAAATTGAATGGCGAGGCCGAGATTTTTTTCCGTAAAAGCTCGATTAAGAATCCC
ATCATCCACAAGAAAGGCAGCATTCTGGTAAATCGTACCTATGAAGCGGAGGAAAAGGACCAATTTGGTAATATTCAGATTGTC
CGTAAGAACATCCCTGAAAATATCTATCAAGAATTATATAAATATTTCAACGATAAGTCGGACAAGGAACTTAGCGATGAAGCC
GCGAAGTTGAAAAATGTTGTTGGTCACCACGAAGCAGCATTTAACATTGTGAAAGACTATCGCTACACTTACGATAAGTACTTT
TTACATATGCCTATTACGATTAACTTTAAGGCAAATAAGACAGGTTTTATCAACGACCGTATCCTGCAATATATTGCAAAAGAG
AAGGACCTGCATGTCATTGGGATTGATCGCGGTGAACGCAATCTGATTTACGTGAGTGTTATTGATACCTGCGGTAATATTGTT
GAGCAAAAGTCTTTTAATATCGTTAATGGTTACGACTACCAAATTAAGCTTAAACAACAGGAAGGTGCCCGCCAGATCGCCCGT
AAGGAGTGGAAGGAAATCGGAAAAATTAAGGAAATCAAAGAGGGATATCTGAGCTTGGTTATTCATGAAATCTCAAAGATGGTT
ATTAAGTACAACGCCATCATCGCTATGGAAGACTTATCGTATGGGTTTAAAAAGGGTCGTTTCAAAGTTGAGCGCCAGGTCTAC
CAAAAGTTTGAAACGATGCTTATTAATAAATTAAACTACTTGGTTTTCAAAGATATCTCTATTACCGAGAATGGAGGTTTACTG
AAAGGATACCAGTTAACGTATATCCCCGATAAGCTTAAAAACGTGGGCCATCAGTGTGGCTGTATTTTCTATGTGCCCGCGGCA
TATACATCAAAAATTGACCCGACGACGGGTTTCGTTAATATCTTCAAGTTCAAAGATCTGACAGTTGATGCAAAACGCGAATTC
ATTAAGAAGTTCGATAGTATTCGCTATGACTCCGAGAAAAATTTGTTTTGCTTCACTTTTGACTACAATAACTTTATTACTCAG
AATACAGTCATGAGTAAAAGCTCCTGGTCGGTTTACACGTACGGGGTACGCATCAAACGTCGTTTTGTGAATGGTCGTTTTAGT
AATGAGTCGGATACAATTGATATTACCAAGGATATGGAGAAGACTCTGGAAATGACAGACATCAATTGGCGTGATGGACATGAT
TTGCGTCAGGACATTATCGACTATGAGATTGTGCAGCATATTTTCGAAATTTTTCGCCTGACGGTGCAAATGCGTAATTCCTTA
AGCGAACTGGAAGATCGCGACTATGACCGCTTAATTTCTCCTGTGCTGAATGAGAACAACATCTTCTATGACTCAGCGAAAGCC
GGGGACGCTTTGCCAAAGGATGCAGATGCTAACGGTGCATATTGTATTGCTCTGAAAGGCCTTTACGAGATCAAACAAATTACT
GAAAACTGGAAGGAAGATGGAAAGTTTTCCCGTGATAAATTGAAGATCTCTAATAAGGACTGGTTTGACTTTATCCAAAATAAA
CGTTATTTA
ErCas12a-S469K/K516P/T826F-AA (SEQ ID NO: 200)
MNNGTNNFQNFIGISSLQKTLRNALIPTETTQQFIVKNGIIKEDELRGENRQILKDIMDDYYRGFISETLSSIDDIDWTSLFEK
MEIQLKNGDNKDTLIKEQTEYRKAIHKKFANDDRFKNMFSAKLISDILPEFVIHNNNYSASEKEEKTQVIKLESRFATSFKDYF
KNRANCFSADDISSSSCHRIVNDNAEIFFSNALVYRRIVKSLSNDDINKISGDMKDSLKEMSLEEIYSYEKYGEFITQEGISFY
NDICGKVNSFMNLYCQKNKENKNLYKLQKLHKQILCIADTSYEVPYKFESDEEVYQSVNGELDNISSKHIVERLRKIGDNYNGY
NLDKIYIVSKFYESVSQKTYRDWETINTALEIHYNNILPGNGKSKADKVKKAVKNDLQKSITEINELVSNYKLCSDDNIKAETY
IHEISHILNNFEAQELKYNPEIHLVESELKASELKNVLDVIMNAFHWCKVFMTEELVDKDNNFYAELEEIYDEIYPVISLYNLV
RNYVTQKPYSTPKIKLNFGIPTLADGWSKSKEYSNNAIILMRDNLYYLGIFNAKNKPDKKIIEGNTSENKGDYKKMIYNLLPGP
NKMIPKVFLSSKTGVETYKPSAYILEGYKQNKHIKSSKDFDITFCHDLIDYFKNCIAIHPEWKNFGFDFSDTSTYEDISGFYRE
VELQGYKIDWTYISEKDIDLLQEKGQLYLFQIYNKDFSKKSTGNDNLHTMYLKNLFSEENLKDIVLKLNGEAEIFFRKSSIKNP
IIHKKGSILVNRTYEAEEKDQFGNIQIVRKNIPENIYQELYKYFNDKSDKELSDEAAKLKNVVGHHEAAFNIVKDYRYTYDKYF
LHMPITINFKANKTGFINDRILQYIAKEKDLHVIGIDRGERNLIYVSVIDTCGNIVEQKSFNIVNGYDYQIKLKQQEGARQIAR
KEWKEIGKIKEIKEGYLSLVIHEISKMVIKYNAIIAMEDLSYGFKKGRFKVERQVYQKFETMLINKLNYLVFKDISITENGGLL
KGYQLTYIPDKLKNVGHQCGCIFYVPAAYTSKIDPTTGFVNIFKFKDLTVDAKREFIKKFDSIRYDSEKNLFCFTFDYNNFITQ
NTVMSKSSWSVYTYGVRIKRRFVNGRFSNESDTIDITKDMEKTLEMTDINWRDGHDLRQDIIDYEIVQHIFEIFRLTVQMRNSL
SELEDRDYDRLISPVLNENNIFYDSAKAGDALPKDADANGAYCIALKGLYEIKQITENWKEDGKFSRDKLKISNKDWFDFIQNK
RYL
ErCas12a-S469K/T826F/F840L-NT (SEQ ID NO: 201)
atgAATAACGGTACCAATAACTTTCAAAATTTTATCGGGATCTCCTCGTTGCAAAAAACTCTTCGTAATGCTTTAATCCCGACT
GAGACAACACAGCAGTTCATCGTTAAAAACGGCATCATTAAAGAAGATGAGCTGCGCGGCGAGAACCGTCAGATTTTAAAGGAC
ATCATGGACGACTATTACCGTGGGTTCATCTCAGAAACATTAAGCAGCATCGATGATATCGACTGGACCTCACTGTTTGAGAAG
ATGGAGATTCAACTTAAGAATGGAGACAACAAAGACACTTTAATTAAGGAGCAGACGGAATATCGTAAAGCTATCCATAAAAAA
TTTGCAAACGATGACCGTTTCAAAAATATGTTTTCCGCAAAATTGATTAGCGACATTTTACCTGAATTCGTAATCCATAACAAC
AACTATTCCGCATCTGAAAAAGAGGAGAAGACCCAAGTTATCAAACTTTTTTCACGTTTCGCGACATCTTTTAAAGACTACTTT
AAGAATCGTGCGAATTGTTTCAGTGCAGATGATATTTCGTCTAGTTCATGTCACCGTATCGTGAATGACAACGCTGAGATTTTC
TTTTCTAATGCGTTGGTGTATCGCCGCATCGTAAAGTCCTTGTCGAATGATGATATCAACAAAATTAGTGGTGACATGAAAGAC
TCCCTGAAAGAAATGTCATTAGAGGAGATTTACAGCTACGAAAAATACGGAGAGTTCATCACTCAGGAAGGTATCTCCTTTTAC
AACGATATTTGCGGCAAAGTTAATAGTTTCATGAATCTGTATTGTCAGAAGAATAAGGAAAACAAGAATCTGTACAAGTTACAA
AAGCTTCATAAACAGATCTTGTGCATCGCCGACACGTCTTATGAAGTCCCGTATAAATTTGAAAGCGACGAAGAAGTATATCAG
AGTGTGAATGGATTCTTGGACAATATCTCATCAAAACACATTGTTGAACGTTTGCGCAAAATCGGCGACAACTATAACGGATAC
AACTTGGATAAAATTTATATCGTATCAAAATTTTATGAATCAGTATCCCAAAAGACTTACCGTGATTGGGAGACTATTAATACG
GCGTTAGAAATCCATTACAACAACATTCTGCCGGGTAACGGTAAATCGAAAGCGGACAAAGTGAAGAAGGCGGTTAAGAACGAT
CTTCAGAAGTCTATCACGGAGATTAATGAGCTGGTTTCCAATTACAAGTTGTGCTCGGATGATAACATCAAAGCTGAAACCTAT
ATCCATGAAATTTCTCATATTCTTAATAACTTCGAGGCACAAGAATTAAAATATAACCCAGAAATTCATCTGGTTGAGAGCGAA
CTTAAAGCTTCAGAATTAAAAAATGTTTTGGACGTAATTATGAACGCCTTCCATTGGTGCAAAGTGTTTATGACAGAGGAGTTA
GTAGATAAGGATAACAACTTTTATGCAGAATTGGAAGAGATCTATGATGAGATCTATCCAGTGATTTCACTGTATAACTTAGTC
CGTAATTACGTCACTCAGAAGCCGTACTCAACTAAAAAGATCAAGTTAAATTTTGGAATTCCGACATTGGCGGATGGTTGGAGT
AAGTCTAAGGAATACTCAAATAACGCTATTATCTTAATGCGTGACAACCTGTATTACTTGGGTATTTTCAATGCCAAAAATAAG
CCCGATAAAAAAATCATTGAAGGGAATACTTCAGAAAATAAGGGAGATTACAAAAAAATGATTTATAACCTTTTGCCAGGCCCA
AACAAAATGATCCCCAAGGTGTTTTTGAGTAGTAAGACGGGAGTAGAAACATATAAGCCATCAGCGTACATTCTTGAAGGGTAC
AAACAAAATAAACACATCAAGAGCAGCAAGGACTTTGACATTACATTTTGTCATGACTTAATCGACTACTTTAAAAATTGCATT
GCCATTCACCCTGAGTGGAAAAATTTTGGTTTCGACTTCAGTGATACCTCTACCTATGAAGATATCTCTGGTTTTTATCGTGAG
GTAGAACTTCAGGGTTACAAGATCGATTGGACGTACATTTCCGAGAAAGACATTGATCTTTTACAAGAGAAGGGTCAGCTTTAC
TTATTTCAGATCTACAATAAAGACTTTTCGAAAAAATCCACGGGCAACGACAACCTTCATACAATGTACTTAAAGAACCTGTTC
TCTGAAGAAAACTTGAAAGATATCGTGCTTAAATTGAATGGCGAGGCCGAGATTTTTTTCCGTAAAAGCTCGATTAAGAATCCC
ATCATCCACAAGAAAGGCAGCATTCTGGTAAATCGTACCTATGAAGCGGAGGAAAAGGACCAATTTGGTAATATTCAGATTGTC
CGTAAGAACATCCCTGAAAATATCTATCAAGAATTATATAAATATTTCAACGATAAGTCGGACAAGGAACTTAGCGATGAAGCC
GCGAAGTTGAAAAATGTTGTTGGTCACCACGAAGCAGCATTTAACATTGTGAAAGACTATCGCTACACTTACGATAAGTACCTG
TTACATATGCCTATTACGATTAACTTTAAGGCAAATAAGACAGGTTTTATCAACGACCGTATCCTGCAATATATTGCAAAAGAG
AAGGACCTGCATGTCATTGGGATTGATCGCGGTGAACGCAATCTGATTTACGTGAGTGTTATTGATACCTGCGGTAATATTGTT
GAGCAAAAGTCTTTTAATATCGTTAATGGTTACGACTACCAAATTAAGCTTAAACAACAGGAAGGTGCCCGCCAGATCGCCCGT
AAGGAGTGGAAGGAAATCGGAAAAATTAAGGAAATCAAAGAGGGATATCTGAGCTTGGTTATTCATGAAATCTCAAAGATGGTT
ATTAAGTACAACGCCATCATCGCTATGGAAGACTTATCGTATGGGTTTAAAAAGGGTCGTTTCAAAGTTGAGCGCCAGGTCTAC
CAAAAGTTTGAAACGATGCTTATTAATAAATTAAACTACTTGGTTTTCAAAGATATCTCTATTACCGAGAATGGAGGTTTACTG
AAAGGATACCAGTTAACGTATATCCCCGATAAGCTTAAAAACGTGGGCCATCAGTGTGGCTGTATTTTCTATGTGCCCGCGGCA
TATACATCAAAAATTGACCCGACGACGGGTTTCGTTAATATCTTCAAGTTCAAAGATCTGACAGTTGATGCAAAACGCGAATTC
ATTAAGAAGTTCGATAGTATTCGCTATGACTCCGAGAAAAATTTGTTTTGCTTCACTTTTGACTACAATAACTTTATTACTCAG
AATACAGTCATGAGTAAAAGCTCCTGGTCGGTTTACACGTACGGGGTACGCATCAAACGTCGTTTTGTGAATGGTCGTTTTAGT
AATGAGTCGGATACAATTGATATTACCAAGGATATGGAGAAGACTCTGGAAATGACAGACATCAATTGGCGTGATGGACATGAT
TTGCGTCAGGACATTATCGACTATGAGATTGTGCAGCATATTTTCGAAATTTTTCGCCTGACGGTGCAAATGCGTAATTCCTTA
AGCGAACTGGAAGATCGCGACTATGACCGCTTAATTTCTCCTGTGCTGAATGAGAACAACATCTTCTATGACTCAGCGAAAGCC
GGGGACGCTTTGCCAAAGGATGCAGATGCTAACGGTGCATATTGTATTGCTCTGAAAGGCCTTTACGAGATCAAACAAATTACT
GAAAACTGGAAGGAAGATGGAAAGTTTTCCCGTGATAAATTGAAGATCTCTAATAAGGACTGGTTTGACTTTATCCAAAATAAA
CGTTATTTA
ErCas12a-S469K/T826F/F840L-AA (SEQ ID NO: 202)
MNNGTNNFQNFIGISSLQKTLRNALIPTETTQQFIVKNGIIKEDELRGENRQILKDIMDDYYRGFISETLSSIDDIDWTSLFEK
MEIQLKNGDNKDTLIKEQTEYRKAIHKKFANDDRFKNMFSAKLISDILPEFVIHNNNYSASEKEEKTQVIKLFSRFATSFKDYF
KNRANCESADDISSSSCHRIVNDNAEIFFSNALVYRRIVKSLSNDDINKISGDMKDSLKEMSLEEIYSYEKYGEFITQEGISFY
NDICGKVNSFMNLYCQKNKENKNLYKLQKLHKQILCIADTSYEVPYKFESDEEVYQSVNGELDNISSKHIVERLRKIGDNYNGY
NLDKIYIVSKFYESVSQKTYRDWETINTALEIHYNNILPGNGKSKADKVKKAVKNDLQKSITEINELVSNYKLCSDDNIKAETY
IHEISHILNNFEAQELKYNPEIHLVESELKASELKNVLDVIMNAFHWCKVFMTEELVDKDNNFYAELEEIYDEIYPVISLYNLV
RNYVTQKPYSTKKIKLNFGIPTLADGWSKSKEYSNNAIILMRDNLYYLGIFNAKNKPDKKIIEGNTSENKGDYKKMIYNLLPGP
NKMIPKVFLSSKTGVETYKPSAYILEGYKQNKHIKSSKDFDITFCHDLIDYFKNCIAIHPEWKNFGFDFSDTSTYEDISGFYRE
VELQGYKIDWTYISEKDIDLLQEKGQLYLFQIYNKDFSKKSTGNDNLHTMYLKNLFSEENLKDIVLKLNGEAEIFFRKSSIKNP
IIHKKGSILVNRTYEAEEKDQFGNIQIVRKNIPENIYQELYKYFNDKSDKELSDEAAKLKNVVGHHEAAFNIVKDYRYTYDKYL
LHMPITINFKANKTGFINDRILQYIAKEKDLHVIGIDRGERNLIYVSVIDTCGNIVEQKSFNIVNGYDYQIKLKQQEGARQIAR
KEWKEIGKIKEIKEGYLSLVIHEISKMVIKYNAIIAMEDLSYGFKKGRFKVERQVYQKFETMLINKLNYLVFKDISITENGGLL
KGYQLTYIPDKLKNVGHQCGCIFYVPAAYTSKIDPTTGFVNIFKFKDLTVDAKREFIKKFDSIRYDSEKNLFCFTFDYNNFITQ
NTVMSKSSWSVYTYGVRIKRRFVNGRFSNESDTIDITKDMEKTLEMTDINWRDGHDLRQDIIDYEIVQHIFEIFRLTVQMRNSL
SELEDRDYDRLISPVLNENNIFYDSAKAGDALPKDADANGAYCIALKGLYEIKQITENWKEDGKFSRDKLKISNKDWFDFIQNK
RYL
ErCas12a-D303R/S469K/T826F/F840L-NT (SEQ ID NO: 203)
atgAATAACGGTACCAATAACTTTCAAAATTTTATCGGGATCTCCTCGTTGCAAAAAACTCTTCGTAATGCTTTAATCCCGACT
GAGACAACACAGCAGTTCATCGTTAAAAACGGCATCATTAAAGAAGATGAGCTGCGCGGCGAGAACCGTCAGATTTTAAAGGAC
ATCATGGACGACTATTACCGTGGGTTCATCTCAGAAACATTAAGCAGCATCGATGATATCGACTGGACCTCACTGTTTGAGAAG
ATGGAGATTCAACTTAAGAATGGAGACAACAAAGACACTTTAATTAAGGAGCAGACGGAATATCGTAAAGCTATCCATAAAAAA
TTTGCAAACGATGACCGTTTCAAAAATATGTTTTCCGCAAAATTGATTAGCGACATTTTACCTGAATTCGTAATCCATAACAAC
AACTATTCCGCATCTGAAAAAGAGGAGAAGACCCAAGTTATCAAACTTTTTTCACGTTTCGCGACATCTTTTAAAGACTACTTT
AAGAATCGTGCGAATTGTTTCAGTGCAGATGATATTTCGTCTAGTTCATGTCACCGTATCGTGAATGACAACGCTGAGATTTTC
TTTTCTAATGCGTTGGTGTATCGCCGCATCGTAAAGTCCTTGTCGAATGATGATATCAACAAAATTAGTGGTGACATGAAAGAC
TCCCTGAAAGAAATGTCATTAGAGGAGATTTACAGCTACGAAAAATACGGAGAGTTCATCACTCAGGAAGGTATCTCCTTTTAC
AACGATATTTGCGGCAAAGTTAATAGTTTCATGAATCTGTATTGTCAGAAGAATAAGGAAAACAAGAATCTGTACAAGTTACAA
AAGCTTCATAAACAGATCTTGTGCATCGCCGACACGTCTTATGAAGTCCCGTATAAATTTGAAAGCCGTGAAGAAGTATATCAG
AGTGTGAATGGATTCTTGGACAATATCTCATCAAAACACATTGTTGAACGTTTGCGCAAAATCGGCGACAACTATAACGGATAC
AACTTGGATAAAATTTATATCGTATCAAAATTTTATGAATCAGTATCCCAAAAGACTTACCGTGATTGGGAGACTATTAATACG
GCGTTAGAAATCCATTACAACAACATTCTGCCGGGTAACGGTAAATCGAAAGCGGACAAAGTGAAGAAGGCGGTTAAGAACGAT
CTTCAGAAGTCTATCACGGAGATTAATGAGCTGGTTTCCAATTACAAGTTGTGCTCGGATGATAACATCAAAGCTGAAACCTAT
ATCCATGAAATTTCTCATATTCTTAATAACTTCGAGGCACAAGAATTAAAATATAACCCAGAAATTCATCTGGTTGAGAGCGAA
CTTAAAGCTTCAGAATTAAAAAATGTTTTGGACGTAATTATGAACGCCTTCCATTGGTGCAAAGTGTTTATGACAGAGGAGTTA
GTAGATAAGGATAACAACTTTTATGCAGAATTGGAAGAGATCTATGATGAGATCTATCCAGTGATTTCACTGTATAACTTAGTC
CGTAATTACGTCACTCAGAAGCCGTACTCAACTAAAAAGATCAAGTTAAATTTTGGAATTCCGACATTGGCGGATGGTTGGAGT
AAGTCTAAGGAATACTCAAATAACGCTATTATCTTAATGCGTGACAACCTGTATTACTTGGGTATTTTCAATGCCAAAAATAAG
CCCGATAAAAAAATCATTGAAGGGAATACTTCAGAAAATAAGGGAGATTACAAAAAAATGATTTATAACCTTTTGCCAGGCCCA
AACAAAATGATCCCCAAGGTGTTTTTGAGTAGTAAGACGGGAGTAGAAACATATAAGCCATCAGCGTACATTCTTGAAGGGTAC
AAACAAAATAAACACATCAAGAGCAGCAAGGACTTTGACATTACATTTTGTCATGACTTAATCGACTACTTTAAAAATTGCATT
GCCATTCACCCTGAGTGGAAAAATTTTGGTTTCGACTTCAGTGATACCTCTACCTATGAAGATATCTCTGGTTTTTATCGTGAG
GTAGAACTTCAGGGTTACAAGATCGATTGGACGTACATTTCCGAGAAAGACATTGATCTTTTACAAGAGAAGGGTCAGCTTTAC
TTATTTCAGATCTACAATAAAGACTTTTCGAAAAAATCCACGGGCAACGACAACCTTCATACAATGTACTTAAAGAACCTGTTC
TCTGAAGAAAACTTGAAAGATATCGTGCTTAAATTGAATGGCGAGGCCGAGATTTTTTTCCGTAAAAGCTCGATTAAGAATCCC
ATCATCCACAAGAAAGGCAGCATTCTGGTAAATCGTACCTATGAAGCGGAGGAAAAGGACCAATTTGGTAATATTCAGATTGTC
CGTAAGAACATCCCTGAAAATATCTATCAAGAATTATATAAATATTTCAACGATAAGTCGGACAAGGAACTTAGCGATGAAGCC
GCGAAGTTGAAAAATGTTGTTGGTCACCACGAAGCAGCATTTAACATTGTGAAAGACTATCGCTACACTTACGATAAGTACCTG
TTACATATGCCTATTACGATTAACTTTAAGGCAAATAAGACAGGTTTTATCAACGACCGTATCCTGCAATATATTGCAAAAGAG
AAGGACCTGCATGTCATTGGGATTGATCGCGGTGAACGCAATCTGATTTACGTGAGTGTTATTGATACCTGCGGTAATATTGTT
GAGCAAAAGTCTTTTAATATCGTTAATGGTTACGACTACCAAATTAAGCTTAAACAACAGGAAGGTGCCCGCCAGATCGCCCGT
AAGGAGTGGAAGGAAATCGGAAAAATTAAGGAAATCAAAGAGGGATATCTGAGCTTGGTTATTCATGAAATCTCAAAGATGGTT
ATTAAGTACAACGCCATCATCGCTATGGAAGACTTATCGTATGGGTTTAAAAAGGGTCGTTTCAAAGTTGAGCGCCAGGTCTAC
CAAAAGTTTGAAACGATGCTTATTAATAAATTAAACTACTTGGTTTTCAAAGATATCTCTATTACCGAGAATGGAGGTTTACTG
AAAGGATACCAGTTAACGTATATCCCCGATAAGCTTAAAAACGTGGGCCATCAGTGTGGCTGTATTTTCTATGTGCCCGCGGCA
TATACATCAAAAATTGACCCGACGACGGGTTTCGTTAATATCTTCAAGTTCAAAGATCTGACAGTTGATGCAAAACGCGAATTC
ATTAAGAAGTTCGATAGTATTCGCTATGACTCCGAGAAAAATTTGTTTTGCTTCACTTTTGACTACAATAACTTTATTACTCAG
AATACAGTCATGAGTAAAAGCTCCTGGTCGGTTTACACGTACGGGGTACGCATCAAACGTCGTTTTGTGAATGGTCGTTTTAGT
AATGAGTCGGATACAATTGATATTACCAAGGATATGGAGAAGACTCTGGAAATGACAGACATCAATTGGCGTGATGGACATGAT
TTGCGTCAGGACATTATCGACTATGAGATTGTGCAGCATATTTTCGAAATTTTTCGCCTGACGGTGCAAATGCGTAATTCCTTA
AGCGAACTGGAAGATCGCGACTATGACCGCTTAATTTCTCCTGTGCTGAATGAGAACAACATCTTCTATGACTCAGCGAAAGCC
GGGGACGCTTTGCCAAAGGATGCAGATGCTAACGGTGCATATTGTATTGCTCTGAAAGGCCTTTACGAGATCAAACAAATTACT
GAAAACTGGAAGGAAGATGGAAAGTTTTCCCGTGATAAATTGAAGATCTCTAATAAGGACTGGTTTGACTTTATCCAAAATAAA
CGTTATTTA
ErCas12a-D303R/S469K/T826F/F840L-AA (SEQ ID NO: 204)
MNNGTNNFQNFIGISSLQKTLRNALIPTETTQQFIVKNGIIKEDELRGENRQILKDIMDDYYRGFISETLSSIDDIDWTSLFEK
MEIQLKNGDNKDTLIKEQTEYRKAIHKKFANDDRFKNMFSAKLISDILPEFVIHNNNYSASEKEEKTQVIKLFSRFATSFKDYF
KNRANCESADDISSSSCHRIVNDNAEIFFSNALVYRRIVKSLSNDDINKISGDMKDSLKEMSLEEIYSYEKYGEFITQEGISFY
NDICGKVNSFMNLYCQKNKENKNLYKLQKLHKQILCIADTSYEVPYKFESREEVYQSVNGFLDNISSKHIVERLRKIGDNYNGY
NLDKIYIVSKFYESVSQKTYRDWETINTALEIHYNNILPGNGKSKADKVKKAVKNDLQKSITEINELVSNYKLCSDDNIKAETY
IHEISHILNNFEAQELKYNPEIHLVESELKASELKNVLDVIMNAFHWCKVFMTEELVDKDNNFYAELEEIYDEIYPVISLYNLV
RNYVTQKPYSTKKIKLNFGIPTLADGWSKSKEYSNNAIILMRDNLYYLGIFNAKNKPDKKIIEGNTSENKGDYKKMIYNLLPGP
NKMIPKVFLSSKTGVETYKPSAYILEGYKQNKHIKSSKDFDITFCHDLIDYFKNCIAIHPEWKNFGFDFSDTSTYEDISGFYRE
VELQGYKIDWTYISEKDIDLLQEKGQLYLFQIYNKDFSKKSTGNDNLHTMYLKNLFSEENLKDIVLKLNGEAEIFFRKSSIKNP
IIHKKGSILVNRTYEAEEKDQFGNIQIVRKNIPENIYQELYKYFNDKSDKELSDEAAKLKNVVGHHEAAFNIVKDYRYTYDKYL
LHMPITINFKANKTGFINDRILQYIAKEKDLHVIGIDRGERNLIYVSVIDTCGNIVEQKSFNIVNGYDYQIKLKQQEGARQIAR
KEWKEIGKIKEIKEGYLSLVIHEISKMVIKYNAIIAMEDLSYGFKKGRFKVERQVYQKFETMLINKLNYLVFKDISITENGGLL
KGYQLTYIPDKLKNVGHQCGCIFYVPAAYTSKIDPTTGFVNIFKFKDLTVDAKREFIKKFDSIRYDSEKNLFCFTFDYNNFITQ
NTVMSKSSWSVYTYGVRIKRRFVNGRFSNESDTIDITKDMEKTLEMTDINWRDGHDLRQDIIDYEIVQHIFEIFRLTVQMRNSL
SELEDRDYDRLISPVLNENNIFYDSAKAGDALPKDADANGAYCIALKGLYEIKQITENWKEDGKFSRDKLKISNKDWFDFIQNK
RYL
ErCas12a-F465R/S469K/T826F/F840L-NT (SEQ ID NO: 205)
atgAATAACGGTACCAATAACTTTCAAAATTTTATCGGGATCTCCTCGTTGCAAAAAACTCTTCGTAATGCTTTAATCCCGACT
GAGACAACACAGCAGTTCATCGTTAAAAACGGCATCATTAAAGAAGATGAGCTGCGCGGCGAGAACCGTCAGATTTTAAAGGAC
ATCATGGACGACTATTACCGTGGGTTCATCTCAGAAACATTAAGCAGCATCGATGATATCGACTGGACCTCACTGTTTGAGAAG
ATGGAGATTCAACTTAAGAATGGAGACAACAAAGACACTTTAATTAAGGAGCAGACGGAATATCGTAAAGCTATCCATAAAAAA
TTTGCAAACGATGACCGTTTCAAAAATATGTTTTCCGCAAAATTGATTAGCGACATTTTACCTGAATTCGTAATCCATAACAAC
AACTATTCCGCATCTGAAAAAGAGGAGAAGACCCAAGTTATCAAACTTTTTTCACGTTTCGCGACATCTTTTAAAGACTACTTT
AAGAATCGTGCGAATTGTTTCAGTGCAGATGATATTTCGTCTAGTTCATGTCACCGTATCGTGAATGACAACGCTGAGATTTTC
TTTTCTAATGCGTTGGTGTATCGCCGCATCGTAAAGTCCTTGTCGAATGATGATATCAACAAAATTAGTGGTGACATGAAAGAC
TCCCTGAAAGAAATGTCATTAGAGGAGATTTACAGCTACGAAAAATACGGAGAGTTCATCACTCAGGAAGGTATCTCCTTTTAC
AACGATATTTGCGGCAAAGTTAATAGTTTCATGAATCTGTATTGTCAGAAGAATAAGGAAAACAAGAATCTGTACAAGTTACAA
AAGCTTCATAAACAGATCTTGTGCATCGCCGACACGTCTTATGAAGTCCCGTATAAATTTGAAAGCGACGAAGAAGTATATCAG
AGTGTGAATGGATTCTTGGACAATATCTCATCAAAACACATTGTTGAACGTTTGCGCAAAATCGGCGACAACTATAACGGATAC
AACTTGGATAAAATTTATATCGTATCAAAATTTTATGAATCAGTATCCCAAAAGACTTACCGTGATTGGGAGACTATTAATACG
GCGTTAGAAATCCATTACAACAACATTCTGCCGGGTAACGGTAAATCGAAAGCGGACAAAGTGAAGAAGGCGGTTAAGAACGAT
CTTCAGAAGTCTATCACGGAGATTAATGAGCTGGTTTCCAATTACAAGTTGTGCTCGGATGATAACATCAAAGCTGAAACCTAT
ATCCATGAAATTTCTCATATTCTTAATAACTTCGAGGCACAAGAATTAAAATATAACCCAGAAATTCATCTGGTTGAGAGCGAA
CTTAAAGCTTCAGAATTAAAAAATGTTTTGGACGTAATTATGAACGCCCGTCATTGGTGCAAAGTGTTTATGACAGAGGAGTTA
GTAGATAAGGATAACAACTTTTATGCAGAATTGGAAGAGATCTATGATGAGATCTATCCAGTGATTTCACTGTATAACTTAGTC
CGTAATTACGTCACTCAGAAGCCGTACTCAACTAAAAAGATCAAGTTAAATTTTGGAATTCCGACATTGGCGGATGGTTGGAGT
AAGTCTAAGGAATACTCAAATAACGCTATTATCTTAATGCGTGACAACCTGTATTACTTGGGTATTTTCAATGCCAAAAATAAG
CCCGATAAAAAAATCATTGAAGGGAATACTTCAGAAAATAAGGGAGATTACAAAAAAATGATTTATAACCTTTTGCCAGGCCCA
AACAAAATGATCCCCAAGGTGTTTTTGAGTAGTAAGACGGGAGTAGAAACATATAAGCCATCAGCGTACATTCTTGAAGGGTAC
AAACAAAATAAACACATCAAGAGCAGCAAGGACTTTGACATTACATTTTGTCATGACTTAATCGACTACTTTAAAAATTGCATT
GCCATTCACCCTGAGTGGAAAAATTTTGGTTTCGACTTCAGTGATACCTCTACCTATGAAGATATCTCTGGTTTTTATCGTGAG
GTAGAACTTCAGGGTTACAAGATCGATTGGACGTACATTTCCGAGAAAGACATTGATCTTTTACAAGAGAAGGGTCAGCTTTAC
TTATTTCAGATCTACAATAAAGACTTTTCGAAAAAATCCACGGGCAACGACAACCTTCATACAATGTACTTAAAGAACCTGTTC
TCTGAAGAAAACTTGAAAGATATCGTGCTTAAATTGAATGGCGAGGCCGAGATTTTTTTCCGTAAAAGCTCGATTAAGAATCCC
ATCATCCACAAGAAAGGCAGCATTCTGGTAAATCGTACCTATGAAGCGGAGGAAAAGGACCAATTTGGTAATATTCAGATTGTC
CGTAAGAACATCCCTGAAAATATCTATCAAGAATTATATAAATATTTCAACGATAAGTCGGACAAGGAACTTAGCGATGAAGCC
GCGAAGTTGAAAAATGTTGTTGGTCACCACGAAGCAGCATTTAACATTGTGAAAGACTATCGCTACACTTACGATAAGTACCTG
TTACATATGCCTATTACGATTAACTTTAAGGCAAATAAGACAGGTTTTATCAACGACCGTATCCTGCAATATATTGCAAAAGAG
AAGGACCTGCATGTCATTGGGATTGATCGCGGTGAACGCAATCTGATTTACGTGAGTGTTATTGATACCTGCGGTAATATTGTT
GAGCAAAAGTCTTTTAATATCGTTAATGGTTACGACTACCAAATTAAGCTTAAACAACAGGAAGGTGCCCGCCAGATCGCCCGT
AAGGAGTGGAAGGAAATCGGAAAAATTAAGGAAATCAAAGAGGGATATCTGAGCTTGGTTATTCATGAAATCTCAAAGATGGTT
ATTAAGTACAACGCCATCATCGCTATGGAAGACTTATCGTATGGGTTTAAAAAGGGTCGTTTCAAAGTTGAGCGCCAGGTCTAC
CAAAAGTTTGAAACGATGCTTATTAATAAATTAAACTACTTGGTTTTCAAAGATATCTCTATTACCGAGAATGGAGGTTTACTG
AAAGGATACCAGTTAACGTATATCCCCGATAAGCTTAAAAACGTGGGCCATCAGTGTGGCTGTATTTTCTATGTGCCCGCGGCA
TATACATCAAAAATTGACCCGACGACGGGTTTCGTTAATATCTTCAAGTTCAAAGATCTGACAGTTGATGCAAAACGCGAATTC
ATTAAGAAGTTCGATAGTATTCGCTATGACTCCGAGAAAAATTTGTTTTGCTTCACTTTTGACTACAATAACTTTATTACTCAG
AATACAGTCATGAGTAAAAGCTCCTGGTCGGTTTACACGTACGGGGTACGCATCAAACGTCGTTTTGTGAATGGTCGTTTTAGT
AATGAGTCGGATACAATTGATATTACCAAGGATATGGAGAAGACTCTGGAAATGACAGACATCAATTGGCGTGATGGACATGAT
TTGCGTCAGGACATTATCGACTATGAGATTGTGCAGCATATTTTCGAAATTTTTCGCCTGACGGTGCAAATGCGTAATTCCTTA
AGCGAACTGGAAGATCGCGACTATGACCGCTTAATTTCTCCTGTGCTGAATGAGAACAACATCTTCTATGACTCAGCGAAAGCC
GGGGACGCTTTGCCAAAGGATGCAGATGCTAACGGTGCATATTGTATTGCTCTGAAAGGCCTTTACGAGATCAAACAAATTACT
GAAAACTGGAAGGAAGATGGAAAGTTTTCCCGTGATAAATTGAAGATCTCTAATAAGGACTGGTTTGACTTTATCCAAAATAAA
CGTTATTTA
ErCas12a-F465R/S469K/T826F/F840L-AA (SEQ ID NO: 206)
MNNGTNNFQNFIGISSLQKTLRNALIPTETTQQFIVKNGIIKEDELRGENRQILKDIMDDYYRGFISETLSSIDDIDWTSLFEK
MEIQLKNGDNKDTLIKEQTEYRKAIHKKFANDDRFKNMFSAKLISDILPEFVIHNNNYSASEKEEKTQVIKLFSRFATSFKDYF
KNRANCFSADDISSSSCHRIVNDNAEIFFSNALVYRRIVKSLSNDDINKISGDMKDSLKEMSLEEIYSYEKYGEFITQEGISFY
NDICGKVNSFMNLYCQKNKENKNLYKLQKLHKQILCIADTSYEVPYKFESDEEVYQSVNGFLDNISSKHIVERLRKIGDNYNGY
NLDKIYIVSKFYESVSQKTYRDWETINTALEIHYNNILPGNGKSKADKVKKAVKNDLQKSITEINELVSNYKLCSDDNIKAETY
IHEISHILNNFEAQELKYNPEIHLVESELKASELKNVLDVIMNARHWCKVFMTEELVDKDNNFYAELEEIYDEIYPVISLYNLV
RNYVTQKPYSTKKIKLNFGIPTLADGWSKSKEYSNNAIILMRDNLYYLGIFNAKNKPDKKIIEGNTSENKGDYKKMIYNLLPGP
NKMIPKVFLSSKTGVETYKPSAYILEGYKQNKHIKSSKDFDITFCHDLIDYFKNCIAIHPEWKNFGFDFSDTSTYEDISGFYRE
VELQGYKIDWTYISEKDIDLLQEKGQLYLFQIYNKDFSKKSTGNDNLHTMYLKNLFSEENLKDIVLKLNGEAEIFFRKSSIKNP
IIHKKGSILVNRTYEAEEKDQFGNIQIVRKNIPENIYQELYKYFNDKSDKELSDEAAKLKNVVGHHEAAFNIVKDYRYTYDKYL
LHMPITINFKANKTGFINDRILQYIAKEKDLHVIGIDRGERNLIYVSVIDTCGNIVEQKSFNIVNGYDYQIKLKQQEGARQIAR
KEWKEIGKIKEIKEGYLSLVIHEISKMVIKYNAIIAMEDLSYGFKKGRFKVERQVYQKFETMLINKLNYLVFKDISITENGGLL
KGYQLTYIPDKLKNVGHQCGCIFYVPAAYTSKIDPTTGFVNIFKFKDLTVDAKREFIKKFDSIRYDSEKNLFCFTFDYNNFITQ
NTVMSKSSWSVYTYGVRIKRRFVNGRFSNESDTIDITKDMEKTLEMTDINWRDGHDLRQDIIDYEIVQHIFEIFRLTVQMRNSL
SELEDRDYDRLISPVLNENNIFYDSAKAGDALPKDADANGAYCIALKGLYEIKQITENWKEDGKFSRDKLKISNKDWFDFIQNK
RYL
ErCas12a-D303R/F465R/S469K/T826F/F840L-NT (SEQ ID NO: 207)
atgAATAACGGTACCAATAACTTTCAAAATTTTATCGGGATCTCCTCGTTGCAAAAAACTCTTCGTAATGCTTTAATCCCGACT
GAGACAACACAGCAGTTCATCGTTAAAAACGGCATCATTAAAGAAGATGAGCTGCGCGGCGAGAACCGTCAGATTTTAAAGGAC
ATCATGGACGACTATTACCGTGGGTTCATCTCAGAAACATTAAGCAGCATCGATGATATCGACTGGACCTCACTGTTTGAGAAG
ATGGAGATTCAACTTAAGAATGGAGACAACAAAGACACTTTAATTAAGGAGCAGACGGAATATCGTAAAGCTATCCATAAAAAA
TTTGCAAACGATGACCGTTTCAAAAATATGTTTTCCGCAAAATTGATTAGCGACATTTTACCTGAATTCGTAATCCATAACAAC
AACTATTCCGCATCTGAAAAAGAGGAGAAGACCCAAGTTATCAAACTTTTTTCACGTTTCGCGACATCTTTTAAAGACTACTTT
AAGAATCGTGCGAATTGTTTCAGTGCAGATGATATTTCGTCTAGTTCATGTCACCGTATCGTGAATGACAACGCTGAGATTTTC
TTTTCTAATGCGTTGGTGTATCGCCGCATCGTAAAGTCCTTGTCGAATGATGATATCAACAAAATTAGTGGTGACATGAAAGAC
TCCCTGAAAGAAATGTCATTAGAGGAGATTTACAGCTACGAAAAATACGGAGAGTTCATCACTCAGGAAGGTATCTCCTTTTAC
AACGATATTTGCGGCAAAGTTAATAGTTTCATGAATCTGTATTGTCAGAAGAATAAGGAAAACAAGAATCTGTACAAGTTACAA
AAGCTTCATAAACAGATCTTGTGCATCGCCGACACGTCTTATGAAGTCCCGTATAAATTTGAAAGCCGTGAAGAAGTATATCAG
AGTGTGAATGGATTCTTGGACAATATCTCATCAAAACACATTGTTGAACGTTTGCGCAAAATCGGCGACAACTATAACGGATAC
AACTTGGATAAAATTTATATCGTATCAAAATTTTATGAATCAGTATCCCAAAAGACTTACCGTGATTGGGAGACTATTAATACG
GCGTTAGAAATCCATTACAACAACATTCTGCCGGGTAACGGTAAATCGAAAGCGGACAAAGTGAAGAAGGCGGTTAAGAACGAT
CTTCAGAAGTCTATCACGGAGATTAATGAGCTGGTTTCCAATTACAAGTTGTGCTCGGATGATAACATCAAAGCTGAAACCTAT
ATCCATGAAATTTCTCATATTCTTAATAACTTCGAGGCACAAGAATTAAAATATAACCCAGAAATTCATCTGGTTGAGAGCGAA
CTTAAAGCTTCAGAATTAAAAAATGTTTTGGACGTAATTATGAACGCCCGTCATTGGTGCAAAGTGTTTATGACAGAGGAGTTA
GTAGATAAGGATAACAACTTTTATGCAGAATTGGAAGAGATCTATGATGAGATCTATCCAGTGATTTCACTGTATAACTTAGTC
CGTAATTACGTCACTCAGAAGCCGTACTCAACTAAAAAGATCAAGTTAAATTTTGGAATTCCGACATTGGCGGATGGTTGGAGT
AAGTCTAAGGAATACTCAAATAACGCTATTATCTTAATGCGTGACAACCTGTATTACTTGGGTATTTTCAATGCCAAAAATAAG
CCCGATAAAAAAATCATTGAAGGGAATACTTCAGAAAATAAGGGAGATTACAAAAAAATGATTTATAACCTTTTGCCAGGCCCA
AACAAAATGATCCCCAAGGTGTTTTTGAGTAGTAAGACGGGAGTAGAAACATATAAGCCATCAGCGTACATTCTTGAAGGGTAC
AAACAAAATAAACACATCAAGAGCAGCAAGGACTTTGACATTACATTTTGTCATGACTTAATCGACTACTTTAAAAATTGCATT
GCCATTCACCCTGAGTGGAAAAATTTTGGTTTCGACTTCAGTGATACCTCTACCTATGAAGATATCTCTGGTTTTTATCGTGAG
GTAGAACTTCAGGGTTACAAGATCGATTGGACGTACATTTCCGAGAAAGACATTGATCTTTTACAAGAGAAGGGTCAGCTTTAC
TTATTTCAGATCTACAATAAAGACTTTTCGAAAAAATCCACGGGCAACGACAACCTTCATACAATGTACTTAAAGAACCTGTTC
TCTGAAGAAAACTTGAAAGATATCGTGCTTAAATTGAATGGCGAGGCCGAGATTTTTTTCCGTAAAAGCTCGATTAAGAATCCC
ATCATCCACAAGAAAGGCAGCATTCTGGTAAATCGTACCTATGAAGCGGAGGAAAAGGACCAATTTGGTAATATTCAGATTGTC
CGTAAGAACATCCCTGAAAATATCTATCAAGAATTATATAAATATTTCAACGATAAGTCGGACAAGGAACTTAGCGATGAAGCC
GCGAAGTTGAAAAATGTTGTTGGTCACCACGAAGCAGCATTTAACATTGTGAAAGACTATCGCTACACTTACGATAAGTACCTG
TTACATATGCCTATTACGATTAACTTTAAGGCAAATAAGACAGGTTTTATCAACGACCGTATCCTGCAATATATTGCAAAAGAG
AAGGACCTGCATGTCATTGGGATTGATCGCGGTGAACGCAATCTGATTTACGTGAGTGTTATTGATACCTGCGGTAATATTGTT
GAGCAAAAGTCTTTTAATATCGTTAATGGTTACGACTACCAAATTAAGCTTAAACAACAGGAAGGTGCCCGCCAGATCGCCCGT
AAGGAGTGGAAGGAAATCGGAAAAATTAAGGAAATCAAAGAGGGATATCTGAGCTTGGTTATTCATGAAATCTCAAAGATGGTT
ATTAAGTACAACGCCATCATCGCTATGGAAGACTTATCGTATGGGTTTAAAAAGGGTCGTTTCAAAGTTGAGCGCCAGGTCTAC
CAAAAGTTTGAAACGATGCTTATTAATAAATTAAACTACTTGGTTTTCAAAGATATCTCTATTACCGAGAATGGAGGTTTACTG
AAAGGATACCAGTTAACGTATATCCCCGATAAGCTTAAAAACGTGGGCCATCAGTGTGGCTGTATTTTCTATGTGCCCGCGGCA
TATACATCAAAAATTGACCCGACGACGGGTTTCGTTAATATCTTCAAGTTCAAAGATCTGACAGTTGATGCAAAACGCGAATTC
ATTAAGAAGTTCGATAGTATTCGCTATGACTCCGAGAAAAATTTGTTTTGCTTCACTTTTGACTACAATAACTTTATTACTCAG
AATACAGTCATGAGTAAAAGCTCCTGGTCGGTTTACACGTACGGGGTACGCATCAAACGTCGTTTTGTGAATGGTCGTTTTAGT
AATGAGTCGGATACAATTGATATTACCAAGGATATGGAGAAGACTCTGGAAATGACAGACATCAATTGGCGTGATGGACATGAT
TTGCGTCAGGACATTATCGACTATGAGATTGTGCAGCATATTTTCGAAATTTTTCGCCTGACGGTGCAAATGCGTAATTCCTTA
AGCGAACTGGAAGATCGCGACTATGACCGCTTAATTTCTCCTGTGCTGAATGAGAACAACATCTTCTATGACTCAGCGAAAGCC
GGGGACGCTTTGCCAAAGGATGCAGATGCTAACGGTGCATATTGTATTGCTCTGAAAGGCCTTTACGAGATCAAACAAATTACT
GAAAACTGGAAGGAAGATGGAAAGTTTTCCCGTGATAAATTGAAGATCTCTAATAAGGACTGGTTTGACTTTATCCAAAATAAA
CGTTATTTA
ErCas12a-D303R/F465R/S469K/T826F/F840L-AA (SEQ ID NO: 208)
MNNGTNNFQNFIGISSLQKTLRNALIPTETTQQFIVKNGIIKEDELRGENRQILKDIMDDYYRGFISETLSSIDDIDWTSLFEK
MEIQLKNGDNKDTLIKEQTEYRKAIHKKFANDDRFKNMFSAKLISDILPEFVIHNNNYSASEKEEKTQVIKLFSRFATSFKDYF
KNRANCFSADDISSSSCHRIVNDNAEIFFSNALVYRRIVKSLSNDDINKISGDMKDSLKEMSLEEIYSYEKYGEFITQEGISFY
NDICGKVNSFMNLYCQKNKENKNLYKLQKLHKQILCIADTSYEVPYKFESREEVYQSVNGELDNISSKHIVERLRKIGDNYNGY
NLDKIYIVSKFYESVSQKTYRDWETINTALEIHYNNILPGNGKSKADKVKKAVKNDLQKSITEINELVSNYKLCSDDNIKAETY
IHEISHILNNFEAQELKYNPEIHLVESELKASELKNVLDVIMNARHWCKVFMTEELVDKDNNFYAELEEIYDEIYPVISLYNLV
RNYVTQKPYSTKKIKLNFGIPTLADGWSKSKEYSNNAIILMRDNLYYLGIFNAKNKPDKKIIEGNTSENKGDYKKMIYNLLPGP
NKMIPKVFLSSKTGVETYKPSAYILEGYKQNKHIKSSKDFDITFCHDLIDYFKNCIAIHPEWKNFGFDFSDTSTYEDISGFYRE
VELQGYKIDWTYISEKDIDLLQEKGQLYLFQIYNKDFSKKSTGNDNLHTMYLKNLFSEENLKDIVLKLNGEAEIFFRKSSIKNP
IIHKKGSILVNRTYEAEEKDQFGNIQIVRKNIPENIYQELYKYFNDKSDKELSDEAAKLKNVVGHHEAAFNIVKDYRYTYDKYL
LHMPITINFKANKTGFINDRILQYIAKEKDLHVIGIDRGERNLIYVSVIDTCGNIVEQKSFNIVNGYDYQIKLKQQEGARQIAR
KEWKEIGKIKEIKEGYLSLVIHEISKMVIKYNAIIAMEDLSYGFKKGRFKVERQVYQKFETMLINKLNYLVFKDISITENGGLL
KGYQLTYIPDKLKNVGHQCGCIFYVPAAYTSKIDPTTGFVNIFKFKDLTVDAKREFIKKFDSIRYDSEKNLFCFTFDYNNFITQ
NTVMSKSSWSVYTYGVRIKRRFVNGRFSNESDTIDITKDMEKTLEMTDINWRDGHDLRQDIIDYEIVQHIFEIFRLTVQMRNSL
SELEDRDYDRLISPVLNENNIFYDSAKAGDALPKDADANGAYCIALKGLYEIKQITENWKEDGKFSRDKLKISNKDWFDFIQNK
RYL
ErCas12a-D303R/S469K/K516P/T826F/F840L-NT (SEQ ID NO: 209)
atgAATAACGGCACCAACAACTTCCAGAACTTTATTGGTATTAGCAGCCTGCAGAAAACCCTGCGTAATGCACTGATTCCGACC
GAAACCACACAGCAGTTTATTGTGAAAAACGGCATCATCAAAGAAGATGAACTTCGCGGAGAAAATCGCCAGATTCTGAAAGAT
ATCATGGATGATTATTATCGCGGTTTTATCAGCGAAACCCTGAGCAGCATTGATGATATTGATTGGACCAGCCTGTTCGAGAAA
ATGGAAATCCAGCTGAAAAATGGCGATAACAAAGACACCCTGATTAAAGAACAGACGGAATATCGTAAAGCCATCCACAAAAAG
TTCGCCAATGATGACCGCTTTAAAAACATGTTCAGCGCAAAACTGATTAGCGATATTCTGCCGGAATTTGTGATCCACAATAAT
AACTATAGCGCCAGCGAGAAAGAAGAGAAAACCCAGGTTATTAAACTGTTTAGCCGTTTTGCGACCAGCTTCAAAGATTACTTC
AAAAATCGTGCCAACTGCTTCAGCGCAGATGATATTAGCAGTAGCAGCTGTCATCGTATTGTGAATGATAACGCCGAAATCTTT
TTCAGCAATGCCCTGGTTTATCGTCGCATTGTTAAAAGCCTGAGCAACGACGACATCAACAAAATCAGCGGTGATATGAAAGAT
AGCCTGAAAGAAATGAGCCTGGAAGAAATCTATAGCTACGAAAAATATGGCGAGTTCATTACCCAAGAAGGCATCAGCTTTTAT
AACGATATTTGCGGCAAAGTGAACAGCTTTATGAATCTGTATTGCCAGAAAAACAAAGAGAACAAAAACCTGTACAAACTGCAG
AAACTGCATAAGCAGATTCTGTGTATTGCAGATACCAGCTATGAAGTGCCGTATAAATTCGAAAGTCGTGAAGAAGTGTACCAG
AGCGTTAATGGTTTTCTGGATAACATCAGCAGCAAACACATTGTTGAACGTCTGCGTAAAATTGGCGACAACTATAATGGCTAT
AACCTGGACAAAATCTACATCGTGAGCAAATTCTATGAAAGCGTGAGCCAGAAAACATATCGTGATTGGGAAACAATTAATACC
GCCTTGGAGATCCACTACAATAACATTCTGCCTGGTAATGGTAAAAGCAAAGCCGACAAAGTTAAAAAGGCCGTGAAAAATGAT
CTGCAGAAATCCATTACCGAAATCAACGAACTGGTCAGCAACTATAAACTGTGTTCCGATGATAATATCAAGGCCGAAACCTAT
ATTCACGAAATCTCCCATATCCTGAACAACTTTGAAGCACAAGAGCTGAAATATAACCCGGAAATTCATCTGGTTGAAAGCGAA
CTGAAAGCCAGTGAACTGAAAAACGTTCTGGATGTGATTATGAACGCCTTTCATTGGTGTAAAGTTTTTATGACCGAAGAACTG
GTGGATAAGGATAACAACTTTTATGCCGAACTGGAAGAAATCTACGATGAAATTTATCCGGTGATCAGCCTGTATAATCTGGTG
CGTAATTATGTGACCCAGAAACCGTATAGCACCCCGAAGATCAAACTGAACTTTGGTATTCCGACACTGGCAGATGGTTGGAGC
AAAAGTAAAGAATATAGCAACAACGCCATTATCCTGATGCGCGATAATCTGTACTATCTGGGTATCTTTAACGCCAAAAACAAA
CCGGACAAGAAAATCATTGAAGGCAATACCAGCGAAAACAAAGGCGACTATAAGAAAATGATTTATAATCTGCTGCCTGGTCCG
AACAAAATGATTCCGAAAGTTTTTCTGAGCAGTAAGACCGGTGTGGAAACATATAAACCGAGCGCATATATTCTGGAAGGCTAC
AAACAGAACAAGCATATCAAAAGCAGCAAAGACTTTGATATCACCTTTTGCCATGATCTGATCGACTATTTCAAAAACTGCATT
GCCATTCATCCGGAATGGAAAAATTTCGGCTTTGATTTCAGCGATACCAGCACCTATGAAGATATTAGCGGTTTTTATCGTGAA
GTGGAACTGCAGGGCTATAAAATCGATTGGACCTATATTAGCGAGAAGGATATTGATCTGCTGCAAGAAAAAGGTCAGCTGTAC
CTGTTTCAGATCTACAACAAAGACTTCAGCAAGAAAAGCACCGGCAATGATAATCTGCATACCATGTATCTGAAGAACCTGTTT
AGCGAAGAGAACCTGAAAGACATTGTGCTGAAACTGAATGGTGAAGCCGAGATTTTCTTTCGCAAATCCAGCATTAAAAACCCG
ATCATCCATAAAAAGGGTAGCATTCTGGTTAATCGTACGTATGAAGCCGAAGAGAAAGATCAGTTTGGCAACATTCAGATTGTG
CGTAAAAACATCCCGGAAAACATCTATCAAGAGCTGTACAAATACTTTAACGATAAAAGCGATAAAGAACTGTCCGATGAAGCA
GCGAAACTGAAGAATGTTGTTGGTCATCATGAAGCCGCATTTAACATTGTGAAAGATTATCGTTACACCTATGATAAATACCTG
CTGCACATGCCGATCACCATCAACTTTAAAGCAAATAAGACGGGTTTCATCAACGATCGCATTCTGCAGTATATCGCCAAAGAA
AAAGACCTGCATGTGATTGGTATTGATCGTGGTGAACGCAATCTGATTTATGTGAGCGTTATTGATACCTGCGGCAATATTGTG
GAACAGAAAAGCTTTAATATCGTGAACGGCTATGACTACCAGATCAAGCTGAAACAGCAAGAAGGTGCACGTCAGATTGCACGT
AAAGAATGGAAAGAAATCGGCAAAATCAAAGAAATTAAAGAAGGCTATCTGAGCCTGGTGATTCATGAGATTAGCAAAATGGTG
ATCAAGTATAACGCCATCATTGCCATGGAAGATCTGAGTTATGGTTTTAAGAAAGGTCGCTTTAAGGTGGAACGTCAGGTGTAT
CAGAAATTTGAAACCATGCTGATCAACAAACTGAATTATCTGGTGTTCAAGGACATCAGCATTACGGAAAATGGTGGTCTGCTG
AAAGGTTATCAGCTGACGTATATTCCGGATAAGCTTAAAAATGTGGGTCATCAGTGTGGCTGCATCTTTTATGTTCCGGCAGCC
TATACCAGCAAAATTGATCCGACCACCGGTTTTGTGAACATCTTCAAATTCAAAGATCTGACCGTTGATGCCAAACGCGAATTC
ATCAAAAAGTTTGATAGCATCCGTTACGACTCCGAGAAAAACCTTTTCTGCTTTACCTTCGACTACAACAACTTTATTACCCAG
AATACGGTGATGAGCAAAAGCAGCTGGTCAGTTTATACCTATGGTGTGCGTATTAAACGTCGCTTTGTGAATGGTCGTTTTAGC
AATGAAAGCGACACCATCGATATCACCAAAGATATGGAAAAGACCCTGGAAATGACCGATATTAACTGGCGTGATGGTCATGAT
CTGCGTCAGGATATTATCGATTATGAAATCGTGCAGCACATCTTTGAAATCTTTCGTCTGACCGTGCAGATGCGTAATAGCCTG
AGCGAGCTGGAAGATCGCGATTATGATCGTCTGATTAGTCCGGTTCTGAACGAAAACAACATCTTCTATGATAGCGCAAAAGCC
GGTGATGCACTGCCGAAAGATGCCGATGCAAATGGTGCATATTGTATTGCACTGAAAGGCCTGTATGAAATCAAGCAGATTACC
GAGAATTGGAAAGAGGATGGTAAATTCAGCCGTGATAAACTGAAAATTAGCAACAAGGATTGGTTCGATTTCATTCAGAACAAA
CGCTACCTG
ErCas12a-D303R/S469K/K516P/T826F/F840L-AA (SEQ ID NO: 210)
MNNGTNNFQNFIGISSLQKTLRNALIPTETTQQFIVKNGIIKEDELRGENRQILKDIMDDYYRGFISETLSSIDDIDWTSLFEK
MEIQLKNGDNKDTLIKEQTEYRKAIHKKFANDDRFKNMFSAKLISDILPEFVIHNNNYSASEKEEKTQVIKLFSRFATSFKDYF
KNRANCFSADDISSSSCHRIVNDNAEIFFSNALVYRRIVKSLSNDDINKISGDMKDSLKEMSLEEIYSYEKYGEFITQEGISFY
NDICGKVNSFMNLYCQKNKENKNLYKLQKLHKQILCIADTSYEVPYKFESREEVYQSVNGELDNISSKHIVERLRKIGDNYNGY
NLDKIYIVSKFYESVSQKTYRDWETINTALEIHYNNILPGNGKSKADKVKKAVKNDLQKSITEINELVSNYKLCSDDNIKAETY
IHEISHILNNFEAQELKYNPEIHLVESELKASELKNVLDVIMNAFHWCKVFMTEELVDKDNNFYAELEEIYDEIYPVISLYNLV
RNYVTQKPYSTPKIKLNFGIPTLADGWSKSKEYSNNAIILMRDNLYYLGIFNAKNKPDKKIIEGNTSENKGDYKKMIYNLLPGP
NKMIPKVFLSSKTGVETYKPSAYILEGYKQNKHIKSSKDFDITFCHDLIDYFKNCIAIHPEWKNFGFDFSDTSTYEDISGFYRE
VELQGYKIDWTYISEKDIDLLQEKGQLYLFQIYNKDFSKKSTGNDNLHTMYLKNLFSEENLKDIVLKLNGEAEIFFRKSSIKNP
IIHKKGSILVNRTYEAEEKDQFGNIQIVRKNIPENIYQELYKYFNDKSDKELSDEAAKLKNVVGHHEAAFNIVKDYRYTYDKYL
LHMPITINFKANKTGFINDRILQYIAKEKDLHVIGIDRGERNLIYVSVIDTCGNIVEQKSFNIVNGYDYQIKLKQQEGARQIAR
KEWKEIGKIKEIKEGYLSLVIHEISKMVIKYNAIIAMEDLSYGFKKGRFKVERQVYQKFETMLINKLNYLVFKDISITENGGLL
KGYQLTYIPDKLKNVGHQCGCIFYVPAAYTSKIDPTTGFVNIFKFKDLTVDAKREFIKKFDSIRYDSEKNLFCFTEDYNNFITQ
NTVMSKSSWSVYTYGVRIKRRFVNGRFSNESDTIDITKDMEKTLEMTDINWRDGHDLRQDIIDYEIVQHIFEIFRLTVQMRNSL
SELEDRDYDRLISPVLNENNIFYDSAKAGDALPKDADANGAYCIALKGLYEIKQITENWKEDGKFSRDKLKISNKDWEDFIQNK
RYL

1. An isolated polypeptide comprising an Eubacterium rectale Cas12a (ERCAS12A) mutant having one or more amino acid substitutions introduced into a wild-type ERCAS12A polypeptide sequence of SEQ ID NO: 2, where the ERCAS12A mutant polypeptide provides an improvement in nuclease activity as compared to the wild-type ERCAS12A polypeptide.

2. The isolated polypeptide of claim 1, wherein the ERCAS12A mutant has 98% to 99% identity to a polypeptide sequence selected from the even numbered sequences of SEQ ID NO: 4-210.

3. The isolated polypeptide of claim 1, wherein the ERCAS12A mutant has a polypeptide sequence selected from the even numbered sequences of SEQ ID NO: 4-210.

4. The isolated polypeptide of claim 1, wherein the ERCAS12A mutant comprises one or more amino acid substitution at positions 18, 35, 39, 39, 40, 56, 56, 59, 59, 158, 165, 181, 290, 291, 296, 297, 297, 297, 303, 303, 305, 307, 353,444, 465, 469, 470,498, 507, 507, 507, 510, 510, 510, 512, 512, 513, 513, 513, 513, 514, 514, 515, 516, 516, 517, 518, 520, 522, 541, 553, 556, 556, 562, 562, 562, 583, 585, 653, 712, 716, 731, 732, 744, 744, 744, 748, 751, 754, 757, 757, 771, 787, 825, 826, 826, 832, 836, 836, 839, 840, 907, 907, 916, 935, 936, 974, or 1019 of the wild-type ERCAS12A polypeptide sequence of SEQ ID NO: 2.

5. The isolated polypeptide of claim 1, wherein the ERCAS12A mutant comprises one or more amino acid substitutions selected from Q18V, 135L, G39K, G39Q, 140Q, D56P, D56R, D59A, D59R, S158G, K165Y, S181V, A290K, D291N, V296R, P297F, P297R, P297V, D303C, D303R, E305K, Y307K, Q353R, L444W, F465R, S469K, V470K, 1498K, Y507R, Y507S, Y507W, Q51OK, Q510V, Q510Y, P512G, P512V, Y513G, Y513L, Y513R, Y513S, S514P, S514R, T515P, K516P, K516R, K517P, 1518P, L520M, F522A, A541V, G553M, N556E, N556R, D5621, D562K, D562V, N583V, L585K, F653R, K712R, N716R, E731P, N732T, A744N, A744P, A744T, F748A, S751A, K754G, 1757K, 1757W, E771R, N787A, A825R, T826F, T826K, Y832R, Y836K, Y836Q, Y839L, F840L, Y9071, Y907V, Q916Y, E935R, 1936R, K974G, K1019V, or combinations thereof of the wild-type ERCAS12A polypeptide sequence of SEQ ID NO: 2.

6. The isolated polypeptide of claim 1, wherein the ERCAS12A mutant is selected from: Q18V (SEQ ID NO: 4); 135L (SEQ ID NO: 6); G39Q (SEQ ID NO: 8); G39K (SEQ ID NO: 10); 140Q (SEQ ID NO: 12); D56R (SEQ ID NO: 14); D56P (SEQ ID NO: 16); D59R (SEQ ID NO: 18); D59A (SEQ ID NO: 20); S158G (SEQ ID NO: 22); K165Y (SEQ ID NO: 24); S181V (SEQ ID NO: 26); A290K (SEQ ID NO: 28); D291N (SEQ ID NO: 30); V296R (SEQ ID NO: 32); P297V (SEQ ID NO: 34); P297R (SEQ ID NO: 36); P297F (SEQ ID NO: 38); D303R (SEQ ID NO: 40); D303C (SEQ ID NO: 42); E305K (SEQ ID NO: 44); Y307K (SEQ ID NO: 46); Q353R (SEQ ID NO: 48); L444W (SEQ ID NO: 50); F465R (SEQ ID NO: 52); S469K (SEQ ID NO: 54); V470K (SEQ ID NO: 56); 1498K (SEQ ID NO: 58); Y507W (SEQ ID NO: 60); Y507S (SEQ ID NO: 62); Y507R (SEQ ID NO: 64); Q510Y (SEQ ID NO: 66); Q510V (SEQ ID NO: 68); Q510K (SEQ ID NO: 70); P512V (SEQ ID NO: 72); P512G (SEQ ID NO: 74); Y513S (SEQ ID NO: 76); Y513R (SEQ ID NO: 78); Y513L (SEQ ID NO: 80); Y513G (SEQ ID NO: 82); S514R (SEQ ID NO: 84); S514P (SEQ ID NO: 86); T515P (SEQ ID NO: 88); K516R (SEQ ID NO: 90); K516P (SEQ ID NO: 92); K517P (SEQ ID NO: 94); 1518P (SEQ ID NO: 96); L520M (SEQ ID NO: 98); F522A (SEQ ID NO: 100); A541V (SEQ ID NO: 102); G553M (SEQ ID NO: 104); N556R (SEQ ID NO: 106); N556E (SEQ ID NO: 108); D562V (SEQ ID NO: 110); D562K (SEQ ID NO: 112); D5621 (SEQ ID NO: 114); N583V (SEQ ID NO: 116); L585K (SEQ ID NO: 118); F653R (SEQ ID NO: 120); K712R (SEQ ID NO: 122); N716R (SEQ ID NO: 124); E731P (SEQ ID NO: 126); N732T (SEQ ID NO: 128); A744T (SEQ ID NO: 130); A744P (SEQ ID NO: 132); A744N (SEQ ID NO: 134); F748A (SEQ ID NO: 136); S751A (SEQ ID NO: 138); K754G (SEQ ID NO: 140); 1757W (SEQ ID NO: 142); 1757K (SEQ ID NO: 144); E771R (SEQ ID NO: 146); N787A (SEQ ID NO: 148); A825R (SEQ ID NO: 150); T826K (SEQ ID NO: 152); T826F (SEQ ID NO: 154); Y832R (SEQ ID NO: 156); Y836Q (SEQ ID NO: 158); Y836K (SEQ ID NO: 160); Y839L (SEQ ID NO: 162); F840L (SEQ ID NO: 164); Y907V (SEQ ID NO: 166); Y9071 (SEQ ID NO: 168); Q916Y (SEQ ID NO: 170); E935R (SEQ ID NO: 172); 1936R (SEQ ID NO: 174); K974G (SEQ ID NO: 176); K1019V (SEQ ID NO: 178); 135L/S469K (SEQ ID NO: 180); 135L/T826F (SEQ ID NO: 182); 140Q/S469K (SEQ ID NO: 184); 140Q/T826F (SEQ ID NO: 186); S469K/K516P (SEQ ID NO: 188); S469K/T826F (SEQ ID NO: 190); Y513G/Y832R (SEQ ID NO: 192); Y513G/F840L (SEQ ID NO: 194); 135L/S469K/T826F (SEQ ID NO: 196); 140Q/S469K/T826F (SEQ ID NO: 198); S469K/K516P/T826F (SEQ ID NO: 200); S469K/T826F/F840L (SEQ ID NO: 202); D303R/S469K/T826F/F840L (SEQ ID NO: 204); F465R/S469K/T826F/F840L (SEQ ID NO: 206); D303R/F465R/S469K/T826F/F840L (SEQ ID NO: 208); or D303R/S469K/K516P/T826F/F840L (SEQ ID NO: 210).

7. The isolated polypeptide of claim 1, wherein the ERCAS12A mutant is selected from D303R/S469K/T826F/F840L (SEQ ID NO: 204); F465R/S469K/T826F/F840L (SEQ ID NO: 206); D303R/F465R/S469K/T826F/F840L (SEQ ID NO: 208); or D303R/S469K/K516P/T826F/F840L (SEQ ID NO: 210).

8. An isolated polynucleotide sequence encoding an Eubacterium rectale Cas12a (ERCAS12A) mutant having one or more amino acid substitutions introduced into a wild-type ERCAS12A polypeptide sequence of SEQ ID NO: 2, where the ERCAS12A variant polypeptide provides an improvement in nuclease activity as compared to the wild-type ERCAS12A polypeptide.

9. The isolated polynucleotide sequence of claim 8, wherein the encoded ERCAS12A mutant has 98% to 99% identity to a polypeptide sequence selected from the even numbered sequences of SEQ ID NO: 4-210.

10. The isolated polynucleotide sequence of claim 8, wherein the encoded ERCAS12A mutant has a polypeptide sequence selected from the even numbered sequences of SEQ ID NO: 4-210.

11. The isolated polynucleotide sequence of claim 8, wherein the ERCAS12A mutant polynucleotide sequence has 95% to 99% identity to a nucleotide sequence selected from the odd numbered sequences of SEQ ID NO: 3-209.

12. The isolated polynucleotide sequence of claim 8, wherein the ERCAS12A mutant polynucleotide has a nucleotide sequence selected from the odd numbered sequences of SEQ ID NO: 3-209.

13. The isolated polynucleotide sequence of claim 8, wherein the encoded ERCAS12A mutant comprises one or more amino acid substitution at positions 18, 35, 39, 39, 40, 56, 56, 59, 59, 158, 165, 181, 290, 291, 296, 297, 297, 297, 303, 303, 305, 307, 353, 444, 465, 469, 470, 498, 507, 507, 507, 510, 510, 510, 512, 512, 513, 513, 513, 513, 514, 514, 515, 516, 516, 517, 518, 520, 522, 541, 553, 556, 556, 562, 562, 562, 583, 585, 653, 712, 716, 731, 732, 744, 744, 744, 748, 751, 754, 757, 757, 771, 787, 825, 826, 826, 832, 836, 836, 839, 840, 907, 907, 916, 935, 936, 974, or 1019 of the wild-type ERCAS12A polypeptide sequence of SEQ ID NO: 2.

14. The isolated polynucleotide sequence of claim 8, wherein the encoded ERCAS12A mutant comprises one or more amino acid substitutions selected from Q18V, 135L, G39K, G39Q, 140Q, D56P, D56R, D59A, D59R, S158G, K165Y, S181V, A290K, D291N, V296R, P297F, P297R, P297V, D303C, D303R, E305K, Y307K, Q353R, L444W, F465R, S469K, V470K, 1498K, Y507R, Y507S, Y507W, Q51OK, Q510V, Q510Y, P512G, P512V, Y513G, Y513L, Y513R, Y513S, S514P, S514R, T515P, K516P, K516R, K517P, 1518P, L520M, F522A, A541V, G553M, N556E, N556R, D5621, D562K, D562V, N583V, L585K, F653R, K712R, N716R, E731P, N732T, A744N, A744P, A744T, F748A, S751A, K754G, 1757K, 1757W, E771R, N787A, A825R, T826F, T826K, Y832R, Y836K, Y836Q, Y839L, F840L, Y9071, Y907V, Q916Y, E935R, 1936R, K974G, K1019V, or combinations thereof of the wild-type ERCAS12A polypeptide sequence of SEQ ID NO: 2.

15. The isolated polynucleotide sequence of claim 8, wherein encoded ERCAS12A mutant polynucleotide is selected from is selected from: Q18V (SEQ ID NO: 4); 135L (SEQ ID NO: 6); G39Q (SEQ ID NO: 8); G39K (SEQ ID NO: 10); 140Q (SEQ ID NO: 12); D56R (SEQ ID NO: 14); D56P (SEQ ID NO: 16); D59R (SEQ ID NO: 18); D59A (SEQ ID NO: 20); S158G (SEQ ID NO: 22); K165Y (SEQ ID NO: 24); S181V (SEQ ID NO: 26); A290K (SEQ ID NO: 28); D291N (SEQ ID NO: 30); V296R (SEQ ID NO: 32); P297V (SEQ ID NO: 34); P297R (SEQ ID NO: 36); P297F (SEQ ID NO: 38); D303R (SEQ ID NO: 40); D303C (SEQ ID NO: 42); E305K (SEQ ID NO: 44); Y307K (SEQ ID NO: 46); Q353R (SEQ ID NO: 48); L444W (SEQ ID NO: 50); F465R (SEQ ID NO: 52); S469K (SEQ ID NO: 54); V470K (SEQ ID NO: 56); 1498K (SEQ ID NO: 58); Y507W (SEQ ID NO: 60); Y507S (SEQ ID NO: 62); Y507R (SEQ ID NO: 64); Q510Y (SEQ ID NO: 66); Q510V (SEQ ID NO: 68); Q510K (SEQ ID NO: 70); P512V (SEQ ID NO: 72); P512G (SEQ ID NO: 74); Y513S (SEQ ID NO: 76); Y513R (SEQ ID NO: 78); Y513L (SEQ ID NO: 80); Y513G (SEQ ID NO: 82); S514R (SEQ ID NO: 84); S514P (SEQ ID NO: 86); T515P (SEQ ID NO: 88); K516R (SEQ ID NO: 90); K516P (SEQ ID NO: 92); K517P (SEQ ID NO: 94); 1518P (SEQ ID NO: 96); L520M (SEQ ID NO: 98); F522A (SEQ ID NO: 100); A541V (SEQ ID NO: 102); G553M (SEQ ID NO: 104); N556R (SEQ ID NO: 106); N556E (SEQ ID NO: 108); D562V (SEQ ID NO: 110); D562K (SEQ ID NO: 112); D5621 (SEQ ID NO: 114); N583V (SEQ ID NO: 116); L585K (SEQ ID NO: 118); F653R (SEQ ID NO: 120); K712R (SEQ ID NO: 122); N716R (SEQ ID NO: 124); E731P (SEQ ID NO: 126); N732T (SEQ ID NO: 128); A744T (SEQ ID NO: 130); A744P (SEQ ID NO: 132); A744N (SEQ ID NO: 134); F748A (SEQ ID NO: 136); S751A (SEQ ID NO: 138); K754G (SEQ ID NO: 140); 1757W (SEQ ID NO: 142); 1757K (SEQ ID NO: 144); E771R (SEQ ID NO: 146); N787A (SEQ ID NO: 148); A825R (SEQ ID NO: 150); T826K (SEQ ID NO: 152); T826F (SEQ ID NO: 154); Y832R (SEQ ID NO: 156); Y836Q (SEQ ID NO: 158); Y836K (SEQ ID NO: 160); Y839L (SEQ ID NO: 162); F840L (SEQ ID NO: 164); Y907V (SEQ ID NO: 166); Y9071 (SEQ ID NO: 168); Q916Y (SEQ ID NO: 170); E935R (SEQ ID NO: 172); 1936R (SEQ ID NO: 174); K974G (SEQ ID NO: 176); K1019V (SEQ ID NO: 178); 135L/S469K (SEQ ID NO: 180); 135L/T826F (SEQ ID NO: 182); 140Q/S469K (SEQ ID NO: 184); 140Q/T826F (SEQ ID NO: 186); S469K/K516P (SEQ ID NO: 188); S469K/T826F (SEQ ID NO: 190); Y513G/Y832R (SEQ ID NO: 192); Y513G/F840L (SEQ ID NO: 194); 135L/S469K/T826F (SEQ ID NO: 196); 140Q/S469K/T826F (SEQ ID NO: 198); S469K/K516P/T826F (SEQ ID NO: 200); S469K/T826F/F840L (SEQ ID NO: 202); D303R/S469K/T826F/F840L (SEQ ID NO: 204); F465R/S469K/T826F/F840L (SEQ ID NO: 206); D303R/F465R/S469K/T826F/F840L (SEQ ID NO: 208); or D303R/S469K/K516P/T826F/F840L (SEQ ID NO: 210).

16. The isolated polynucleotide sequence of claim 8, wherein the ERCAS12A mutant poly nucleotide is selected from Q18V (SEQ ID NO: 3); 135L (SEQ ID NO: 5); G39Q (SEQ ID NO: 7); G39K (SEQ ID NO: 9); 140Q (SEQ ID NO: 11); D56R (SEQ ID NO: 13); D56P (SEQ ID NO: 15); D59R (SEQ ID NO: 17); D59A (SEQ ID NO: 19); S158G (SEQ ID NO: 21); K165Y (SEQ ID NO: 23); S181V (SEQ ID NO: 25); A290K (SEQ ID NO: 27); D291N (SEQ ID NO: 29); V296R (SEQ ID NO: 31); P297V (SEQ ID NO: 33); P297R (SEQ ID NO: 35); P297F (SEQ ID NO: 37); D303R (SEQ ID NO: 39); D303C (SEQ ID NO: 41); E305K (SEQ ID NO: 43); Y307K (SEQ ID NO: 45); Q353R (SEQ ID NO: 47); L444W (SEQ ID NO: 49); F465R (SEQ ID NO: 51); S469K (SEQ ID NO: 53); V470K (SEQ ID NO: 55); 1498K (SEQ ID NO: 57); Y507W (SEQ ID NO: 59); Y507S (SEQ ID NO: 61); Y507R (SEQ ID NO: 63); Q510Y (SEQ ID NO: 65); Q510V (SEQ ID NO: 67); Q510K (SEQ ID NO: 69); P512V (SEQ ID NO: 71); P512G (SEQ ID NO: 73); Y513S (SEQ ID NO: 75); Y513R (SEQ ID NO: 77); Y513L (SEQ ID NO: 79); Y513G (SEQ ID NO: 81); S514R (SEQ ID NO: 83); S514P (SEQ ID NO: 85); T515P (SEQ ID NO: 87); K516R (SEQ ID NO: 89); K516P (SEQ ID NO: 91); K517P (SEQ ID NO: 93); 1518P (SEQ ID NO: 95); L520M (SEQ ID NO: 97); F522A (SEQ ID NO: 99); A541V (SEQ ID NO: 101); G553M (SEQ ID NO: 103); N556R (SEQ ID NO: 105); N556E (SEQ ID NO: 107); D562V (SEQ ID NO: 109); D562K (SEQ ID NO: 111); D5621 (SEQ ID NO: 113); N583V (SEQ ID NO: 115); L585K (SEQ ID NO: 117); F653R (SEQ ID NO: 119); K712R (SEQ ID NO: 121); N716R (SEQ ID NO: 123); E731P (SEQ ID NO: 125); N732T (SEQ ID NO: 127); A744T (SEQ ID NO: 129); A744P (SEQ ID NO: 131); A744N (SEQ ID NO: 132); F748A (SEQ ID NO: 135); S751A (SEQ ID NO: 137); K754G (SEQ ID NO: 139); 1757W (SEQ ID NO: 141); 1757K (SEQ ID NO: 143); E771R (SEQ ID NO: 145); N787A (SEQ ID NO: 147); A825R (SEQ ID NO: 149); T826K (SEQ ID NO: 151); T826F (SEQ ID NO: 153); Y832R (SEQ ID NO: 155); Y836Q (SEQ ID NO: 157); Y836K (SEQ ID NO: 159); Y839L (SEQ ID NO: 161); F840L (SEQ ID NO: 163); Y907V (SEQ ID NO: 165); Y9071 (SEQ ID NO: 167); Q916Y (SEQ ID NO: 169); E935R (SEQ ID NO: 171); 1936R (SEQ ID NO: 173); K974G (SEQ ID NO: 175); K1019V (SEQ ID NO: 177); 135L/S469K (SEQ ID NO: 179); 135L/T826F (SEQ ID NO: 181); 140Q/S469K (SEQ ID NO: 183); 140Q/T826F (SEQ ID NO: 185); S469K/K516P (SEQ ID NO: 187); S469K/T826F (SEQ ID NO: 189); Y513G/Y832R (SEQ ID NO: 191); Y513G/F840L (SEQ ID NO: 193); 135L/S469K/T826F (SEQ ID NO: 195); 140Q/S469K/T826F (SEQ ID NO: 197); S469K/K516P/T826F (SEQ ID NO: 199); S469K/T826F/F840L (SEQ ID NO: 201); D303R/S469K/T826F/F840L (SEQ ID NO: 203); F465R/S469K/T826F/F840L (SEQ ID NO: 205); D303R/F465R/S469K/T826F/F840L (SEQ ID NO: 207); or D303R/S469K/K516P/T826F/F840L (SEQ ID NO: 209).

17. The isolated polynucleotide sequence of claim 8 wherein the ERCAS12A mutant polynucleotide is selected from is selected from: D303R/S469K/T826F/F840L (SEQ ID NO: 203); F465R/S469K/T826F/F840L (SEQ ID NO: 205); D303R/F465R/S469K/T826F/F840L (SEQ ID NO: 207); or D303R/S469K/K516P/T826F/F840L (SEQ ID NO: 209).

18. A vector or plasmid comprising the polynucleotide sequence of claim 8.

19-31. (canceled)

32. A method for performing gene editing comprising:
contacting a candidate editing target site locus with a CRISPR ribonucleoprotein complex comprising a crRNA and an ERCAS12A mutant polypeptide comprising having one or more amino acid substitutions introduced into a wild-type ERCAS12A polypeptide sequence of SEQ ID NO: 2, where the ERCAS12A mutant provides improved gene editing as compared to the wild-type ERCAS12A polypeptide.

33. The method of claim 32, wherein the ERCAS12A mutant has a polypeptide sequence selected from the even numbered sequences of SEQ ID NO: 4-210.

34-45. (canceled)

The application's sequence listing, which the Patent Office published only in electronic form, follows.

SEQUENCE LISTING (1667 sequences)

SEQ ID NO: 1 - DNA, 3789 bp, Eubacterium rectale
  source 1..3789: mol_type = other DNA
atgaataacggcaccaacaacttccagaactttattggtattagcagcctgcagaaaaccctgcgtaatgcactgattccgaccgaaaccacacagcagtttattgtgaaaaacggcatcatcaaagaagatgaacttcgcggagaaaatcgccagattctgaaagatatcatggatgattattatcgcggttttatcagcgaaaccctgagcagcattgatgatattgattggaccagcctgttcgagaaaatggaaatccagctgaaaaatggcgataacaaagacaccctgattaaagaacaggccgaaaaacgtaaagccatctacaaaaaattcgccgatgatgaccgctttaaaaacatgttcagcgcaaaactgattagcgatattctgccggaatttgtgatccacaataataactatagcgccagcgagaaagaagagaaaacccaggttattaaactgtttagccgttttgcgaccagcttcaaagattacttcaaaaatcgtgccaactgcttcagcgcagatgatattagcagtagcagctgtcatcgtattgtgaatgataacgccgaaatcttttttagcaatgccctggtttatcgtcgcatcgttaaaaatctgagcaacgacgatatcaacaaaatcagcggtgatatgaaagacagcctgaaagaaatgagcctggaaaaaatctacagctacgaaaaatatggcgagttcattacccaagaaggcatcagcttttataacgatatttgcggcaaagtgaacagctttatgaatctgtattgccagaaaaacaaagagaacaaaaacctgtacaaactgcgcaaactgcataagcagattctgtgtattgcagataccagctatgaagtgccgtataaattcgaaagtgatgaagaagtgtaccagagcgttaatggttttctggataacatcagcagcaaacacattgttgaacgtctgcgtaaaattggcgacaactataatggctataacctggacaaaatttacatcgtgagcaagttttatgaactggtgagccagaaaacatatcgtgattgggaaacaattaataccgccttggagatccactacaataacattctgcctggtaatggtaaaagcaaagccgacaaagttaaaaaggccgtgaaaaatgatctgcagaaatccattaccgaaatcaacgaactggtcagcaactataaactgtgtccggatgataatatcaaggccgaaacctatattcacgaaatctcccatatcctgaacaactttgaagcacaagagctgaaatataacccggaaattcatctggttgaaagcgaactgaaagccagtgaactgaaaaacgttctggatgtgattatgaacgcctttcattggtgtagcgtttttatgaccgaagaactggtggataaggataacaacttttatgccgaactggaagagatctatgatgaaatttatccggtgatcagcctgtataatctggtgcgtaattatgtgacccagaaaccgtatagcaccaaaaaaatcaaactgaactttggcattccgacactggcagatggttggagcaaaagtaaagaatatagcaacaacgccattatcctgatgcgcgataatctgtactatctgggtatctttaacgccaaaaacaaaccggacaaaaagatcattgaaggcaataccagcgaaaacaaaggcgactataaaaagatgatctacaatctgctgcctggtccgaataaaatgattccgaaagttttcctgagcagtaaaaccggtgtggaaacatataaaccgagcgcatatattctggaaggctacaaacagaacaagcatctgaaaagcagcaaagactttgatatcaccttttgccgtgatctgatcgactatttcaaaaactgcattgccattcatccggaatggaaaaactttggctttgattttagcgataccagcacctatgaagatatcagcggtttttatcgtgaagttgaactgcagggctataaaatcgattggacctatattagcgagaaggatattgatctgctgcaagaaaaaggtcagctgtacctgtttcagatctacaacaaagacttcagcaaaaaaagcaccggcaatgataatctgcataccatgtatctgaagaacctgtttagcgaagagaacctgaaagacattgtgctgaaactgaatggtgaagccgaaattttctttcgtaagagcagcatcaaaaacccgatcatccataaaaaaggtagcattctggtgaatcgtacgtatgaagcagaagaaaaagaccagtttggcaacattcagattgtgcgtaaaacaatcccggaaaacatctatcaagagctgtacaaatactttaacgataaaagcgataaagaactgtccgatgaagcagccaaactgaagaatgttgttggtcatcatgaagccgcaaccaacattgttaaagattatcgttacacctatgataaatactttctgcacatgccgatcaccatcaactttaaagcaaataagacgagcttcatcaacgatcgcattctgcagtatatcgccaaagaaaaggatctgcatgtgattggtattgatcgtggtgaacgcaatctgatttatgtgagcgttattgatacctgcggcaatattgtggaacagaaaagctttaatatcgtgaacggctatgactaccagatcaagctgaaacagcaagaaggtgcacgtcagattgcacgtaaagaatggaaagaaatcggcaagatcaaagaaatcaaagagggttatctgagcctggtgattcatgaaattagcaaaatggtgatcaaatataacgccatcattgccatggaagatctgagttatggtttcaaaaaaggtcgctttaaggtggaacgtcaggtgtatcagaaatttgaaacgatgctgatcaacaaactgaattatctggtgttcaaggacatcagcattacggaaaatggtggtctgctgaaaggttatcagctgacgtatattccggaaaagcttaaaaatgtgggtcatcagtgtggctgcatcttttatgttccggcagcctataccagcaaaattgatccgaccaccggctttgttaacatcttcaaattcaaagatctgaccgtggatgccaaacgcgaatttatcaaaaagtttgatagcatccgctacgacagcgagaagaacttattttgtttcaccttcgactacaacaactttatcacccagaatacggttatgagcaaaagcagctggtcagtttatacctatggtgtgcgtattaaacgtcgctttgtgaatggtcgcttttcaaatgaaagcgacaccatcgatatcaccaaagacatggaaaaaaccctggaaatgaccgatattaactggcgtgatggtcatgatctgcgtcaggatattatcgattatgaaatcgtgcagcacatctttgaaatttttcgtctgaccgttcagatgcgtaatagcctgagcgagctggaagatcgcgattatgatcgtctgattagtccggttctgaacgaaaacaacatcttctatgatagcgcaaaagcgggtgatgcactgccgaaagatgccgatgcaaatggtgcatattgtattgcactgaaaggcctgtatgaaatcaagcagattaccgagaattggaaagaggatggtaaattcagccgtgataaactgaaaatctccaacaaggattggttcgatttcatccagaataaacgctacctg

SEQ ID NO: 2 - protein, 1263 aa, Eubacterium rectale
MNNGTNNFQNFIGISSLQKTLRNALIPTETTQQFIVKNGIIKEDELRGENRQILKDIMDDYYRGFISETLSSIDDIDWTSLFEKMEIQLKNGDNKDTLIKEQAEKRKAIYKKFADDDRFKNMFSAKLISDILPEFVIHNNNYSASEKEEKTQVIKLFSRFATSFKDYFKNRANCFSADDISSSSCHRIVNDNAEIFFSNALVYRRIVKNLSNDDINKISGDMKDSLKEMSLEKIYSYEKYGEFITQEGISFYNDICGKVNSFMNLYCQKNKENKNLYKLRKLHKQILCIADTSYEVPYKFESDEEVYQSVNGFLDNISSKHIVERLRKIGDNYNGYNLDKIYIVSKFYELVSQKTYRDWETINTALEIHYNNILPGNGKSKADKVKKAVKNDLQKSITEINELVSNYKLCPDDNIKAETYIHEISHILNNFEAQELKYNPEIHLVESELKASELKNVLDVIMNAFHWCSVFMTEELVDKDNNFYAELEEIYDEIYPVISLYNLVRNYVTQKPYSTKKIKLNFGIPTLADGWSKSKEYSNNAIILMRDNLYYLGIFNAKNKPDKKIIEGNTSENKGDYKKMIYNLLPGPNKMIPKVFLSSKTGVETYKPSAYILEGYKQNKHLKSSKDFDITFCRDLIDYFKNCIAIHPEWKNFGFDFSDTSTYEDISGFYREVELQGYKIDWTYISEKDIDLLQEKGQLYLFQIYNKDFSKKSTGNDNLHTMYLKNLFSEENLKDIVLKLNGEAEIFFRKSSIKNPIIHKKGSILVNRTYEAEEKDQFGNIQIVRKTIPENIYQELYKYFNDKSDKELSDEAAKLKNVVGHHEAATNIVKDYRYTYDKYFLHMPITINFKANKTSFINDRILQYIAKEKDLHVIGIDRGERNLIYVSVIDTCGNIVEQKSFNIVNGYDYQIKLKQQEGARQIARKEWKEIGKIKEIKEGYLSLVIHEISKMVIKYNAIIAMEDLSYGFKKGRFKVERQVYQKFETMLINKLNYLVFKDISITENGGLLKGYQLTYIPEKLKNVGHQCGCIFYVPAAYTSKIDPTTGFVNIFKFKDLTVDAKREFIKKFDSIRYDSEKNLFCFTFDYNNFITQNTVMSKSSWSVYTYGVRIKRRFVNGRFSNESDTIDITKDMEKTLEMTDINWRDGHDLRQDIIDYEIVQHIFEIFRLTVQMRNSLSELEDRDYDRLISPVLNENNIFYDSAKAGDALPKDADANGAYCIALKGLYEIKQITENWKEDGKFSRDKLKISNKDWFDFIQNKRYL

SEQ ID NO: 3 - DNA, 3789 bp, synthetic construct
  source 1..3789: mol_type = other DNA
atgaataacggtaccaataactttcaaaattttatcgggatctcctcgttggtgaaaactcttcgtaatgctttaatcccgactgagacaacacagcagttcatcgttaaaaacggcatcattaaagaagatgagctgcgcggcgagaaccgtcagattttaaaggacatcatggacgactattaccgtgggttcatctcagaaacattaagcagcatcgatgatatcgactggacctcactgtttgagaagatggagattcaacttaagaatggagacaacaaagacactttaattaaggagcagacggaatatcgtaaagctatccataaaaaatttgcaaacgatgaccgtttcaaaaatatgttttccgcaaaattgattagcgacattttacctgaattcgtaatccataacaacaactattccgcatctgaaaaagaggagaagacccaagttatcaaacttttttcacgtttcgcgacatcttttaaagactactttaagaatcgtgcgaattgtttcagtgcagatgatatttcgtctagttcatgtcaccgtatcgtgaatgacaacgctgagattttcttttctaatgcgttggtgtatcgccgcatcgtaaagtccttgtcgaatgatgatatcaacaaaattagtggtgacatgaaagactccctgaaagaaatgtcattagaggagatttacagctacgaaaaatacggagagttcatcactcaggaaggtatctccttttacaacgatatttgcggcaaagttaatagtttcatgaatctgtattgtcagaagaataaggaaaacaagaatctgtacaagttacaaaagcttcataaacagatcttgtgcatcgccgacacgtcttatgaagtcccgtataaatttgaaagcgacgaagaagtatatcagagtgtgaatggattcttggacaatatctcatcaaaacacattgttgaacgtttgcgcaaaatcggcgacaactataacggatacaacttggataaaatttatatcgtatcaaaattttatgaatcagtatcccaaaagacttaccgtgattgggagactattaatacggcgttagaaatccattacaacaacattctgccgggtaacggtaaatcgaaagcggacaaagtgaagaaggcggttaagaacgatcttcagaagtctatcacggagattaatgagctggtttccaattacaagttgtgctcggatgataacatcaaagctgaaacctatatccatgaaatttctcatattcttaataacttcgaggcacaagaattaaaatataacccagaaattcatctggttgagagcgaacttaaagcttcagaattaaaaaatgttttggacgtaattatgaacgccttccattggtgcagcgtgtttatgacagaggagttagtagataaggataacaacttttatgcagaattggaagagatctatgatgagatctatccagtgatttcactgtataacttagtccgtaattacgtcactcagaagccgtactcaactaaaaagatcaagttaaattttggaattccgacattggcggatggttggagtaagtctaaggaatactcaaataacgctattatcttaatgcgtgacaacctgtattacttgggtattttcaatgccaaaaataagcccgataaaaaaatcattgaagggaatacttcagaaaataagggagattacaaaaaaatgatttataaccttttgccaggcccaaacaaaatgatccccaaggtgtttttgagtagtaagacgggagtagaaacatataagccatcagcgtacattcttgaagggtacaaacaaaataaacacatcaagagcagcaaggactttgacattacattttgtcatgacttaatcgactactttaaaaattgcattgccattcaccctgagtggaaaaattttggtttcgacttcagtgatacctctacctatgaagatatctctggtttttatcgtgaggtagaacttcagggttacaagatcgattggacgtacatttccgagaaagacattgatcttttacaagagaagggtcagctttacttatttcagatctacaataaagacttttcgaaaaaatccacgggcaacgacaaccttcatacaatgtacttaaagaacctgttctctgaagaaaacttgaaagatatcgtgcttaaattgaatggcgaggccgagatttttttccgtaaaagctcgattaagaatcccatcatccacaagaaaggcagcattctggtaaatcgtacctatgaagcggaggaaaaggaccaatttggtaatattcagattgtccgtaagaacatccctgaaaatatctatcaagaattatataaatatttcaacgataagtcggacaaggaacttagcgatgaagccgcgaagttgaaaaatgttgttggtcaccacgaagcagcaacaaacattgtgaaagactatcgctacacttacgataagtactttttacatatgcctattacgattaactttaaggcaaataagacaggttttatcaacgaccgtatcctgcaatatattgcaaaagagaaggacctgcatgtcattgggattgatcgcggtgaacgcaatctgatttacgtgagtgttattgatacctgcggtaatattgttgagcaaaagtcttttaatatcgttaatggttacgactaccaaattaagcttaaacaacaggaaggtgcccgccagatcgcccgtaaggagtggaaggaaatcggaaaaattaaggaaatcaaagagggatatctgagcttggttattcatgaaatctcaaagatggttattaagtacaacgccatcatcgctatggaagacttatcgtatgggtttaaaaagggtcgtttcaaagttgagcgccaggtctaccaaaagtttgaaacgatgcttattaataaattaaactacttggttttcaaagatatctctattaccgagaatggaggtttactgaaaggataccagttaacgtatatccccgataagcttaaaaacgtgggccatcagtgtggctgtattttctatgtgcccgcggcatatacatcaaaaattgacccgacgacgggtttcgttaatatcttcaagttcaaagatctgacagttgatgcaaaacgcgaattcattaagaagttcgatagtattcgctatgactccgagaaaaatttgttttgcttcacttttgactacaataactttattactcagaatacagtcatgagtaaaagctcctggtcggtttacacgtacggggtacgcatcaaacgtcgttttgtgaatggtcgttttagtaatgagtcggatacaattgatattaccaaggatatggagaagactctggaaatgacagacatcaattggcgtgatggacatgatttgcgtcaggacattatcgactatgagattgtgcagcatattttcgaaatttttcgcctgacggtgcaaatgcgtaattccttaagcgaactggaagatcgcgactatgaccgcttaatttctcctgtgctgaatgagaacaacatcttctatgactcagcgaaagccggggacgctttgccaaaggatgcagatgctaacggtgcatattgtattgctctgaaaggcctttacgagatcaaacaaattactgaaaactggaaggaagatggaaagttttcccgtgataaattgaagatctctaataaggactggtttgactttatccaaaataaacgttattta

SEQ ID NO: 4 - protein, 1263 aa, synthetic construct
MNNGTNNFQNFIGISSLVKTLRNALIPTETTQQFIVKNGIIKEDELRGENRQILKDIMDDYYRGFISETLSSIDDIDWTSLFEKMEIQLKNGDNKDTLIKEQTEYRKAIHKKFANDDRFKNMFSAKLISDILPEFVIHNNNYSASEKEEKTQVIKLFSRFATSFKDYFKNRANCFSADDISSSSCHRIVNDNAEIFFSNALVYRRIVKSLSNDDINKISGDMKDSLKEMSLEEIYSYEKYGEFITQEGISFYNDICGKVNSFMNLYCQKNKENKNLYKLQKLHKQILCIADTSYEVPYKFESDEEVYQSVNGFLDNISSKHIVERLRKIGDNYNGYNLDKIYIVSKFYESVSQKTYRDWETINTALEIHYNNILPGNGKSKADKVKKAVKNDLQKSITEINELVSNYKLCSDDNIKAETYIHEISHILNNFEAQELKYNPEIHLVESELKASELKNVLDVIMNAFHWCSVFMTEELVDKDNNFYAELEEIYDEIYPVISLYNLVRNYVTQKPYSTKKIKLNFGIPTLADGWSKSKEYSNNAIILMRDNLYYLGIFNAKNKPDKKIIEGNTSENKGDYKKMIYNLLPGPNKMIPKVFLSSKTGVETYKPSAYILEGYKQNKHIKSSKDFDITFCHDLIDYFKNCIAIHPEWKNFGFDFSDTSTYEDISGFYREVELQGYKIDWTYISEKDIDLLQEKGQLYLFQIYNKDFSKKSTGNDNLHTMYLKNLFSEENLKDIVLKLNGEAEIFFRKSSIKNPIIHKKGSILVNRTYEAEEKDQFGNIQIVRKNIPENIYQELYKYFNDKSDKELSDEAAKLKNVVGHHEAATNIVKDYRYTYDKYFLHMPITINFKANKTGFINDRILQYIAKEKDLHVIGIDRGERNLIYVSVIDTCGNIVEQKSFNIVNGYDYQIKLKQQEGARQIARKEWKEIGKIKEIKEGYLSLVIHEISKMVIKYNAIIAMEDLSYGFKKGRFKVERQVYQKFETMLINKLNYLVFKDISITENGGLLKGYQLTYIPDKLKNVGHQCGCIFYVPAAYTSKIDPTTGFVNIFKFKDLTVDAKREFIKKFDSIRYDSEKNLFCFTFDYNNFITQNTVMSKSSWSVYTYGVRIKRRFVNGRFSNESDTIDITKDMEKTLEMTDINWRDGHDLRQDIIDYEIVQHIFEIFRLTVQMRNSLSELEDRDYDRLISPVLNENNIFYDSAKAGDALPKDADANGAYCIALKGLYEIKQITENWKEDGKFSRDKLKISNKDWFDFIQNKRYL

SEQ ID NO: 5 - DNA, 3789 bp, synthetic construct
  source 1..3789: mol_type = other DNA
atgaataacggtaccaataactttcaaaattttatcgggatctcctcgttgcaaaaaactcttcgtaatgctttaatcccgactgagacaacacagcagttcctggttaaaaacggcatcattaaagaagatgagctgcgcggcgagaaccgtcagattttaaaggacatcatggacgactattaccgtgggttcatctcagaaacattaagcagcatcgatgatatcgactggacctcactgtttgagaagatggagattcaacttaagaatggagacaacaaagacactttaattaaggagcagacggaatatcgtaaagctatccataaaaaatttgcaaacgatgaccgtttcaaaaatatgttttccgcaaaattgattagcgacattttacctgaattcgtaatccataacaacaactattccgcatctgaaaaagaggagaagacccaagttatcaaacttttttcacgtttcgcgacatcttttaaagactactttaagaatcgtgcgaattgtttcagtgcagatgatatttcgtctagttcatgtcaccgtatcgtgaatgacaacgctgagattttcttttctaatgcgttggtgtatcgccgcatcgtaaagtccttgtcgaatgatgatatcaacaaaattagtggtgacatgaaagactccctgaaagaaatgtcattagaggagatttacagctacgaaaaatacggagagttcatcactcaggaaggtatctccttttacaacgatatttgcggcaaagttaatagtttcatgaatctgtattgtcagaagaataaggaaaacaagaatctgtacaagttacaaaagcttcataaacagatcttgtgcatcgccgacacgtcttatgaagtcccgtataaatttgaaagcgacgaagaagtatatcagagtgtgaatggattcttggacaatatctcatcaaaacacattgttgaacgtttgcgcaaaatcggcgacaactataacggatacaacttggataaaatttatatcgtatcaaaattttatgaatcagtatcccaaaagacttaccgtgattgggagactattaatacggcgttagaaatccattacaacaacattctgccgggtaacggtaaatcgaaagcggacaaagtgaagaaggcggttaagaacgatcttcagaagtctatcacggagattaatgagctggtttccaattacaagttgtgctcggatgataacatcaaagctgaaacctatatccatgaaatttctcatattcttaataacttcgaggcacaagaattaaaatataacccagaaattcatctggttgagagcgaacttaaagcttcagaattaaaaaatgttttggacgtaattatgaacgccttccattggtgcagcgtgtttatgacagaggagttagtagataaggataacaacttttatgcagaattggaagagatctatgatgagatctatccagtgatttcactgtataacttagtccgtaattacgtcactcagaagccgtactcaactaaaaagatcaagttaaattttggaattccgacattggcggatggttggagtaagtctaaggaatactcaaataacgctattatcttaatgcgtgacaacctgtattacttgggtattttcaatgccaaaaataagcccgataaaaaaatcattgaagggaatacttcagaaaataagggagattacaaaaaaatgatttataaccttttgccaggcccaaacaaaatgatccccaaggtgtttttgagtagtaagacgggagtagaaacatataagccatcagcgtacattcttgaagggtacaaacaaaataaacacatcaagagcagcaaggactttgacattacattttgtcatgacttaatcgactactttaaaaattgcattgccattcaccctgagtggaaaaattttggtttcgacttcagtgatacctctacctatgaagatatctctggtttttatcgtgaggtagaacttcagggttacaagatcgattggacgtacatttccgagaaagacattgatcttttacaagagaagggtcagctttacttatttcagatctacaataaagacttttcgaaaaaatccacgggcaacgacaaccttcatacaatgtacttaaagaacctgttctctgaagaaaacttgaaagatatcgtgcttaaattgaatggcgaggccgagatttttttccgtaaaagctcgattaagaatcccatcatccacaagaaaggcagcattctggtaaatcgtacctatgaagcggaggaaaaggaccaatttggtaatattcagattgtccgtaagaacatccctgaaaatatctatcaagaattatataaatatttcaacgataagtcggacaaggaacttagcgatgaagccgcgaagttgaaaaatgttgttggtcaccacgaagcagcaacaaacattgtgaaagactatcgctacacttacgataagtactttttacatatgcctattacgattaactttaaggcaaataagacaggttttatcaacgaccgtatcctgcaatatattgcaaaagagaaggacctgcatgtcattgggattgatcgcggtgaacgcaatctgatttacgtgagtgttattgatacctgcggtaatattgttgagcaaaagtcttttaatatcgttaatggttacgactaccaaattaagcttaaacaacaggaaggtgcccgccagatcgcccgtaaggagtggaaggaaatcggaaaaattaaggaaatcaaagagggatatctgagcttggttattcatgaaatctcaaagatggttattaagtacaacgccatcatcgctatggaagacttatcgtatgggtttaaaaagggtcgtttcaaagttgagcgccaggtctaccaaaagtttgaaacgatgcttattaataaattaaactacttggttttcaaagatatctctattaccgagaatggaggtttactgaaaggataccagttaacgtatatccccgataagcttaaaaacgtgggccatcagtgtggctgtattttctatgtgcccgcggcatatacatcaaaaattgacccgacgacgggtttcgttaatatcttcaagttcaaagatctgacagttgatgcaaaacgcgaattcattaagaagttcgatagtattcgctatgactccgagaaaaatttgttttgcttcacttttgactacaataactttattactcagaatacagtcatgagtaaaagctcctggtcggtttacacgtacggggtacgcatcaaacgtcgttttgtgaatggtcgttttagtaatgagtcggatacaattgatattaccaaggatatggagaagactctggaaatgacagacatcaattggcgtgatggacatgatttgcgtcaggacattatcgactatgagattgtgcagcatattttcgaaatttttcgcctgacggtgcaaatgcgtaattccttaagcgaactggaagatcgcgactatgaccgcttaatttctcctgtgctgaatgagaacaacatcttctatgactcagcgaaagccggggacgctttgccaaaggatgcagatgctaacggtgcatattgtattgctctgaaaggcctttacgagatcaaacaaattactgaaaactggaaggaagatggaaagttttcccgtgataaattgaagatctctaataaggactggtttgactttatccaaaataaacgttattta

SEQ ID NO: 6 - protein, 1263 aa, synthetic construct
MNNGTNNFQNFIGISSLQKTLRNALIPTETTQQFIVKNGIIKEDELRGENRQILKDIMDDYYRGFISETLSSIDDIDWTSLFEKMEIQLKNGDNKDTLIKEQTEYRKAIHKKFANDDRFKNMFSAKLISDILPEFVIHNNNYSASEKEEKTQVIKLFSRFATSFKDYFKNRANCFSADDISSSSCHRIVNDNAEIFFSNALVYRRIVKSLSNDDINKISGDMKDSLKEMSLEEIYSYEKYGEFITQEGISFYNDICGKVNSFMNLYCQKNKENKNLYKLQKLHKQILCIADTSYEVPYKFESDEEVYQSVNGFLDNISSKHIVERLRKIGDNYNGYNLDKIYIVSKFYESVSQKTYRDWETINTALEIHYNNILPGNGKSKADKVKKAVKNDLQKSITEINELVSNYKLCSDDNIKAETYIHEISHILNNFEAQELKYNPEIHLVESELKASELKNVLDVIMNAFHWCSVFMTEELVDKDNNFYAELEEIYDEIYPVISLYNLVRNYVTQKPYSTKKIKLNFGIPTLADGWSKSKEYSNNAIILMRDNLYYLGIFNAKNKPDKKIIEGNTSENKGDYKKMIYNLLPGPNKMIPKVFLSSKTGVETYKPSAYILEGYKQNKHIKSSKDFDITFCHDLIDYFKNCIAIHPEWKNFGFDFSDTSTYEDISGFYREVELQGYKIDWTYISEKDIDLLQEKGQLYLFQIYNKDFSKKSTGNDNLHTMYLKNLFSEENLKDIVLKLNGEAEIFFRKSSIKNPIIHKKGSILVNRTYEAEEKDQFGNIQIVRKNIPENIYQELYKYFNDKSDKELSDEAAKLKNVVGHHEAATNIVKDYRYTYDKYFLHMPITINFKANKTGFINDRILQYIAKEKDLHVIGIDRGERNLIYVSVIDTCGNIVEQKSFNIVNGYDYQIKLKQQEGARQIARKEWKEIGKIKEIKEGYLSLVIHEISKMVIKYNAIIAMEDLSYGFKKGRFKVERQVYQKFETMLINKLNYLVFKDISITENGGLLKGYQLTYIPDKLKNVGHQCGCIFYVPAAYTSKIDPTTGFVNIFKFKDLTVDAKREFIKKFDSIRYDSEKNLFCFTFDYNNFITQNTVMSKSSWSVYTYGVRIKRRFVNGRFSNESDTIDITKDMEKTLEMTDINWRDGHDLRQDIIDYEIVQHIFEIFRLTVQMRNSLSELEDRDYDRLISPVLNENNIFYDSAKAGDALPKDADANGAYCIALKGLYEIKQITENWKEDGKFSRDKLKISNKDWFDFIQNKRYL

SEQ ID NO: 7 - DNA, 3789 bp, synthetic construct
  source 1..3789: mol_type = other DNA
atgaataacggtaccaataactttcaaaattttatcgggatctcctcgttgcaaaaaactcttcgtaatgctttaatcccgactgagacaacacagcagttcatcgttaaaaaccagatcattaaagaagatgagctgcgcggcgagaaccgtcagattttaaaggacatcatggacgactattaccgtgggttcatctcagaaacattaagcagcatcgatgatatcgactggacctcactgtttgagaagatggagattcaacttaagaatggagacaacaaagacactttaattaaggagcagacggaatatcgtaaagctatccataaaaaatttgcaaacgatgaccgtttcaaaaatatgttttccgcaaaattgattagcgacattttacctgaattcgtaatccataacaacaactattccgcatctgaaaaagaggagaagacccaagttatcaaacttttttcacgtttcgcgacatcttttaaagactactttaagaatcgtgcgaattgtttcagtgcagatgatatttcgtctagttcatgtcaccgtatcgtgaatgacaacgctgagattttcttttctaatgcgttggtgtatcgccgcatcgtaaagtccttgtcgaatgatgatatcaacaaaattagtggtgacatgaaagactccctgaaagaaatgtcattagaggagatttacagctacgaaaaatacggagagttcatcactcaggaaggtatctccttttacaacgatatttgcggcaaagttaatagtttcatgaatctgtattgtcagaagaataaggaaaacaagaatctgtacaagttacaaaagcttcataaacagatcttgtgcatcgccgacacgtcttatgaagtcccgtataaatttgaaagcgacgaagaagtatatcagagtgtgaatggattcttggacaatatctcatcaaaacacattgttgaacgtttgcgcaaaatcggcgacaactataacggatacaacttggataaaatttatatcgtatcaaaattttatgaatcagtatcccaaaagacttaccgtgattgggagactattaatacggcgttagaaatccattacaacaacattctgccgggtaacggtaaatcgaaagcggacaaagtgaagaaggcggttaagaacgatcttcagaagtctatcacggagattaatgagctggtttccaattacaagttgtgctcggatgataacatcaaagctgaaacctatatccatgaaatttctcatattcttaataacttcgaggcacaagaattaaaatataacccagaaattcatctggttgagagcgaacttaaagcttcagaattaaaaaatgttttggacgtaattatgaacgccttccattggtgcagcgtgtttatgacagaggagttagtagataaggataacaacttttatgcagaattggaagagatctatgatgagatctatccagtgatttcactgtataacttagtccgtaattacgtcactcagaagccgtactcaactaaaaagatcaagttaaattttggaattccgacattggcggatggttggagtaagtctaaggaatactcaaataacgctattatcttaatgcgtgacaacctgtattacttgggtattttcaatgccaaaaataagcccgataaaaaaatcattgaagggaatacttcagaaaataagggagattacaaaaaaatgatttataaccttttgccaggcccaaacaaaatgatccccaaggtgtttttgagtagtaagacgggagtagaaacatataagccatcagcgtacattcttgaagggtacaaacaaaataaacacatcaagagcagcaaggactttgacattacattttgtcatgacttaatcgactactttaaaaattgcattgccattcaccctgagtggaaaaattttggtttcgacttcagtgatacctctacctatgaagatatctctggtttttatcgtgaggtagaacttcagggttacaagatcgattggacgtacatttccgagaaagacattgatcttttacaagagaagggtcagctttacttatttcagatctacaataaagacttttcgaaaaaatccacgggcaacgacaaccttcatacaatgtacttaaagaacctgttctctgaagaaaacttgaaagatatcgtgcttaaattgaatggcgaggccgagatttttttccgtaaaagctcgattaagaatcccatcatccacaagaaaggcagcattctggtaaatcgtacctatgaagcggaggaaaaggaccaatttggtaatattcagattgtccgtaagaacatccctgaaaatatctatcaagaattatataaatatttcaacgataagtcggacaaggaacttagcgatgaagccgcgaagttgaaaaatgttgttggtcaccacgaagcagcaacaaacattgtgaaagactatcgctacacttacgataagtactttttacatatgcctattacgattaactttaaggcaaataagacaggttttatcaacgaccgtatcctgcaatatattgcaaaagagaaggacctgcatgtcattgggattgatcgcggtgaacgcaatctgatttacgtgagtgttattgatacctgcggtaatattgttgagcaaaagtcttttaatatcgttaatggttacgactaccaaattaagcttaaacaacaggaaggtgcccgccagatcgcccgtaaggagtggaaggaaatcggaaaaattaaggaaatcaaagagggatatctgagcttggttattcatgaaatctcaaagatggttattaagtacaacgccatcatcgctatggaagacttatcgtatgggtttaaaaagggtcgtttcaaagttgagcgccaggtctaccaaaagtttgaaacgatgcttattaataaattaaactacttggttttcaaagatatctctattaccgagaatggaggtttactgaaaggataccagttaacgtatatccccgataagcttaaaaacgtgggccatcagtgtggctgtattttctatgtgcccgcggcatatacatcaaaaattgacccgacgacgggtttcgttaatatcttcaagttcaaagatctgacagttgatgcaaaacgcgaattcattaagaagttcgatagtattcgctatgactccgagaaaaatttgttttgcttcacttttgactacaataactttattactcagaatacagtcatgagtaaaagctcctggtcggtttacacgtacggggtacgcatcaaacgtcgttttgtgaatggtcgttttagtaatgagtcggatacaattgatattaccaaggatatggagaagactctggaaatgacagacatcaattggcgtgatggacatgatttgcgtcaggacattatcgactatgagattgtgcagcatattttcgaaatttttcgcctgacggtgcaaatgcgtaattccttaagcgaactggaagatcgcgactatgaccgcttaatttctcctgtgctgaatgagaacaacatcttctatgactcagcgaaagccggggacgctttgccaaaggatgcagatgctaacggtgcatattgtattgctctgaaaggcctttacgagatcaaacaaattactgaaaactggaaggaagatggaaagttttcccgtgataaattgaagatctctaataaggactggtttgactttatccaaaataaacgttattta

SEQ ID NO: 8 - protein, 1263 aa, synthetic construct
MNNGTNNFQNFIGISSLQKTLRNALIPTETTQQFIVKNQIIKEDELRGENRQILKDIMDDYYRGFISETLSSIDDIDWTSLFEKMEIQLKNGDNKDTLIKEQTEYRKAIHKKFANDDRFKNMFSAKLISDILPEFVIHNNNYSASEKEEKTQVIKLFSRFATSFKDYFKNRANCFSADDISSSSCHRIVNDNAEIFFSNALVYRRIVKSLSNDDINKISGDMKDSLKEMSLEEIYSYEKYGEFITQEGISFYNDICGKVNSFMNLYCQKNKENKNLYKLQKLHKQILCIADTSYEVPYKFESDEEVYQSVNGFLDNISSKHIVERLRKIGDNYNGYNLDKIYIVSKFYESVSQKTYRDWETINTALEIHYNNILPGNGKSKADKVKKAVKNDLQKSITEINELVSNYKLCSDDNIKAETYIHEISHILNNFEAQELKYNPEIHLVESELKASELKNVLDVIMNAFHWCSVFMTEELVDKDNNFYAELEEIYDEIYPVISLYNLVRNYVTQKPYSTKKIKLNFGIPTLADGWSKSKEYSNNAIILMRDNLYYLGIFNAKNKPDKKIIEGNTSENKGDYKKMIYNLLPGPNKMIPKVFLSSKTGVETYKPSAYILEGYKQNKHIKSSKDFDITFCHDLIDYFKNCIAIHPEWKNFGFDFSDTSTYEDISGFYREVELQGYKIDWTYISEKDIDLLQEKGQLYLFQIYNKDFSKKSTGNDNLHTMYLKNLFSEENLKDIVLKLNGEAEIFFRKSSIKNPIIHKKGSILVNRTYEAEEKDQFGNIQIVRKNIPENIYQELYKYFNDKSDKELSDEAAKLKNVVGHHEAATNIVKDYRYTYDKYFLHMPITINFKANKTGFINDRILQYIAKEKDLHVIGIDRGERNLIYVSVIDTCGNIVEQKSFNIVNGYDYQIKLKQQEGARQIARKEWKEIGKIKEIKEGYLSLVIHEISKMVIKYNAIIAMEDLSYGFKKGRFKVERQVYQKFETMLINKLNYLVFKDISITENGGLLKGYQLTYIPDKLKNVGHQCGCIFYVPAAYTSKIDPTTGFVNIFKFKDLTVDAKREFIKKFDSIRYDSEKNLFCFTFDYNNFITQNTVMSKSSWSVYTYGVRIKRRFVNGRFSNESDTIDITKDMEKTLEMTDINWRDGHDLRQDIIDYEIVQHIFEIFRLTVQMRNSLSELEDRDYDRLISPVLNENNIFYDSAKAGDALPKDADANGAYCIALKGLYEIKQITENWKEDGKFSRDKLKISNKDWFDFIQNKRYL

SEQ ID NO: 9 - DNA, 3789 bp, synthetic construct
  source 1..3789: mol_type = other DNA
atgaataacggtaccaataactttcaaaattttatcgggatctcctcgttgcaaaaaactcttcgtaatgctttaatcccgactgagacaacacagcagttcatcgttaaaaacaaaatcattaaagaagatgagctgcgcggcgagaaccgtcagattttaaaggacatcatggacgactattaccgtgggttcatctcagaaacattaagcagcatcgatgatatcgactggacctcactgtttgagaagatggagattcaacttaagaatggagacaacaaagacactttaattaaggagcagacggaatatcgtaaagctatccataaaaaatttgcaaacgatgaccgtttcaaaaatatgttttccgcaaaattgattagcgacattttacctgaattcgtaatccataacaacaactattccgcatctgaaaaagaggagaagacccaagttatcaaacttttttcacgtttcgcgacatcttttaaagactactttaagaatcgtgcgaattgtttcagtgcagatgatatttcgtctagttcatgtcaccgtatcgtgaatgacaacgctgagattttcttttctaatgcgttggtgtatcgccgcatcgtaaagtccttgtcgaatgatgatatcaacaaaattagtggtgacatgaaagactccctgaaagaaatgtcattagaggagatttacagctacgaaaaatacggagagttcatcactcaggaaggtatctccttttacaacgatatttgcggcaaagttaatagtttcatgaatctgtattgtcagaagaataaggaaaacaagaatctgtacaagttacaaaagcttcataaacagatcttgtgcatcgccgacacgtcttatgaagtcccgtataaatttgaaagcgacgaagaagtatatcagagtgtgaatggattcttggacaatatctcatcaaaacacattgttgaacgtttgcgcaaaatcggcgacaactataacggatacaacttggataaaatttatatcgtatcaaaattttatgaatcagtatcccaaaagacttaccgtgattgggagactattaatacggcgttagaaatccattacaacaacattctgccgggtaacggtaaatcgaaagcggacaaagtgaagaaggcggttaagaacgatcttcagaagtctatcacggagattaatgagctggtttccaattacaagttgtgctcggatgataacatcaaagctgaaacctatatccatgaaatttctcatattcttaataacttcgaggcacaagaattaaaatataacccagaaattcatctggttgagagcgaacttaaagcttcagaattaaaaaatgttttggacgtaattatgaacgccttccattggtgcagcgtgtttatgacagaggagttagtagataaggataacaacttttatgcagaattggaagagatctatgatgagatctatccagtgatttcactgtataacttagtccgtaattacgtcactcagaagccgtactcaactaaaaagatcaagttaaattttggaattccgacattggcggatggttggagtaagtctaaggaatactcaaataacgctattatcttaatgcgtgacaacctgtattacttgggtattttcaatgccaaaaataagcccgataaaaaaatcattgaagggaatacttcagaaaataagggagattacaaaaaaatgatttataaccttttgccaggcccaaacaaaatgatccccaaggtgtttttgagtagtaagacgggagtagaaacatataagccatcagcgtacattcttgaagggtacaaacaaaataaacacatcaagagcagcaaggactttgacattacattttgtcatgacttaatcgactactttaaaaattgcattgccattcaccctgagtggaaaaattttggtttcgacttcagtgatacctctacctatgaagatatctctggtttttatcgtgaggtagaacttcagggttacaagatcgattggacgtacatttccgagaaagacattgatcttttacaagagaagggtcagctttacttatttcagatctacaataaagacttttcgaaaaaatccacgggcaacgacaaccttcatacaatgtacttaaagaacctgttctctgaagaaaacttgaaagatatcgtgcttaaattgaatggcgaggccgagatttttttccgtaaaagctcgattaagaatcccatcatccacaagaaaggcagcattctggtaaatcgtacctatgaagcggaggaaaaggaccaatttggtaatattcagattgtccgtaagaacatccctgaaaatatctatcaagaattatataaatatttcaacgataagtcggacaaggaacttagcgatgaagccgcgaagttgaaaaatgttgttggtcaccacgaagcagcaacaaacattgtgaaagactatcgctacacttacgataagtactttttacatatgcctattacgattaactttaaggcaaataagacaggttttatcaacgaccgtatcctgcaatatattgcaaaagagaaggacctgcatgtcattgggattgatcgcggtgaacgcaatctgatttacgtgagtgttattgatacctgcggtaatattgttgagcaaaagtcttttaatatcgttaatggttacgactaccaaattaagcttaaacaacaggaaggtgcccgccagatcgcccgtaaggagtggaaggaaatcggaaaaattaaggaaatcaaagagggatatctgagcttggttattcatgaaatctcaaagatggttattaagtacaacgccatcatcgctatggaagacttatcgtatgggtttaaaaagggtcgtttcaaagttgagcgccaggtctaccaaaagtttgaaacgatgcttattaataaattaaactacttggttttcaaagatatctctattaccgagaatggaggtttactgaaaggataccagttaacgtatatccccgataagcttaaaaacgtgggccatcagtgtggctgtattttctatgtgcccgcggcatatacatcaaaaattgacccgacgacgggtttcgttaatatcttcaagttcaaagatctgacagttgatgcaaaacgcgaattcattaagaagttcgatagtattcgctatgactccgagaaaaatttgttttgcttcacttttgactacaataactttattactcagaatacagtcatgagtaaaagctcctggtcggtttacacgtacggggtacgcatcaaacgtcgttttgtgaatggtcgttttagtaatgagtcggatacaattgatattaccaaggatatggagaagactctggaaatgacagacatcaattggcgtgatggacatgatttgcgtcaggacattatcgactatgagattgtgcagcatattttcgaaatttttcgcctgacggtgcaaatgcgtaattccttaagcgaactggaagatcgcgactatgaccgcttaatttctcctgtgctgaatgagaacaacatcttctatgactcagcgaaagccggggacgctttgccaaaggatgcagatgctaacggtgcatattgtattgctctgaaaggcctttacgagatcaaacaaattactgaaaactggaaggaagatggaaagttttcccgtgataaattgaagatctctaataaggactggtttgactttatccaaaataaacgttattta

SEQ ID NO: 10 - protein, 1263 aa, synthetic construct
MNNGTNNFQNFIGISSLQKTLRNALIPTETTQQFIVKNKIIKEDELRGENRQILKDIMDDYYRGFISETLSSIDDIDWTSLFEKMEIQLKNGDNKDTLIKEQTEYRKAIHKKFANDDRFKNMFSAKLISDILPEFVIHNNNYSASEKEEKTQVIKLFSRFATSFKDYFKNRANCFSADDISSSSCHRIVNDNAEIFFSNALVYRRIVKSLSNDDINKISGDMKDSLKEMSLEEIYSYEKYGEFITQEGISFYNDICGKVNSFMNLYCQKNKENKNLYKLQKLHKQILCIADTSYEVPYKFESDEEVYQSVNGFLDNISSKHIVERLRKIGDNYNGYNLDKIYIVSKFYESVSQKTYRDWETINTALEIHYNNILPGNGKSKADKVKKAVKNDLQKSITEINELVSNYKLCSDDNIKAETYIHEISHILNNFEAQELKYNPEIHLVESELKASELKNVLDVIMNAFHWCSVFMTEELVDKDNNFYAELEEIYDEIYPVISLYNLVRNYVTQKPYSTKKIKLNFGIPTLADGWSKSKEYSNNAIILMRDNLYYLGIFNAKNKPDKKIIEGNTSENKGDYKKMIYNLLPGPNKMIPKVFLSSKTGVETYKPSAYILEGYKQNKHIKSSKDFDITFCHDLIDYFKNCIAIHPEWKNFGFDFSDTSTYEDISGFYREVELQGYKIDWTYISEKDIDLLQEKGQLYLFQIYNKDFSKKSTGNDNLHTMYLKNLFSEENLKDIVLKLNGEAEIFFRKSSIKNPIIHKKGSILVNRTYEAEEKDQFGNIQIVRKNIPENIYQELYKYFNDKSDKELSDEAAKLKNVVGHHEAATNIVKDYRYTYDKYFLHMPITINFKANKTGFINDRILQYIAKEKDLHVIGIDRGERNLIYVSVIDTCGNIVEQKSFNIVNGYDYQIKLKQQEGARQIARKEWKEIGKIKEIKEGYLSLVIHEISKMVIKYNAIIAMEDLSYGFKKGRFKVERQVYQKFETMLINKLNYLVFKDISITENGGLLKGYQLTYIPDKLKNVGHQCGCIFYVPAAYTSKIDPTTGFVNIFKFKDLTVDAKREFIKKFDSIRYDSEKNLFCFTFDYNNFITQNTVMSKSSWSVYTYGVRIKRRFVNGRFSNESDTIDITKDMEKTLEMTDINWRDGHDLRQDIIDYEIVQHIFEIFRLTVQMRNSLSELEDRDYDRLISPVLNENNIFYDSAKAGDALPKDADANGAYCIALKGLYEIKQITENWKEDGKFSRDKLKISNKDWFDFIQNKRYL

SEQ ID NO: 11 - DNA, 3789 bp, synthetic construct
  source 1..3789: mol_type = other DNA
atgaataacggtaccaataactttcaaaattttatcgggatctcctcgttgcaaaaaactcttcgtaatgctttaatcccgactgagacaacacagcagttcatcgttaaaaacggccagattaaagaagatgagctgcgcggcgagaaccgtcagattttaaaggacatcatggacgactattaccgtgggttcatctcagaaacattaagcagcatcgatgatatcgactggacctcactgtttgagaagatggagattcaacttaagaatggagacaacaaagacactttaattaaggagcagacggaatatcgtaaagctatccataaaaaatttgcaaacgatgaccgtttcaaaaatatgttttccgcaaaattgattagcgacattttacctgaattcgtaatccataacaacaactattccgcatctgaaaaagaggagaagacccaagttatcaaacttttttcacgtttcgcgacatcttttaaagactactttaagaatcgtgcgaattgtttcagtgcagatgatatttcgtctagttcatgtcaccgtatcgtgaatgacaacgctgagattttcttttctaatgcgttggtgtatcgccgcatcgtaaagtccttgtcgaatgatgatatcaacaaaattagtggtgacatgaaagactccctgaaagaaatgtcattagaggagatttacagctacgaaaaatacggagagttcatcactcaggaaggtatctccttttacaacgatatttgcggcaaagttaatagtttcatgaatctgtattgtcagaagaataaggaaaacaagaatctgtacaagttacaaaagcttcataaacagatcttgtgcatcgccgacacgtcttatgaagtcccgtataaatttgaaagcgacgaagaagtatatcagagtgtgaatggattcttggacaatatctcatcaaaacacattgttgaacgtttgcgcaaaatcggcgacaactataacggatacaacttggataaaatttatatcgtatcaaaattttatgaatcagtatcccaaaagacttaccgtgattgggagactattaatacggcgttagaaatccattacaacaacattctgccgggtaacggtaaatcgaaagcggacaaagtgaagaaggcggttaagaacgatcttcagaagtctatcacggagattaatgagctggtttccaattacaagttgtgctcggatgataacatcaaagctgaaacctatatccatgaaatttctcatattcttaataacttcgaggcacaagaattaaaatataacccagaaattcatctggttgagagcgaacttaaagcttcagaattaaaaaatgttttggacgtaattatgaacgccttccattggtgcagcgtgtttatgacagaggagttagtagataaggataacaacttttatgcagaattggaagagatctatgatgagatctatccagtgatttcactgtataacttagtccgtaattacgtcactcagaagccgtactcaactaaaaagatcaagttaaattttggaattccgacattggcggatggttggagtaagtctaaggaatactcaaataacgctattatcttaatgcgtgacaacctgtattacttgggtattttcaatgccaaaaataagcccgataaaaaaatcattgaagggaatacttcagaaaataagggagattacaaaaaaatgatttataaccttttgccaggcccaaacaaaatgatccccaaggtgtttttgagtagtaagacgggagtagaaacatataagccatcagcgtacattcttgaagggtacaaacaaaataaacacatcaagagcagcaaggactttgacattacattttgtcatgacttaatcgactactttaaaaattgcattgccattcaccctgagtggaaaaattttggtttcgacttcagtgatacctctacctatgaagatatctctggtttttatcgtgaggtagaacttcagggttacaagatcgattggacgtacatttccgagaaagacattgatcttttacaagagaagggtcagctttacttatttcagatctacaataaagacttttcgaaaaaatccacgggcaacgacaaccttcatacaatgtacttaaagaacctgttctctgaagaaaacttgaaagatatcgtgcttaaattgaatggcgaggccgagatttttttccgtaaaagctcgattaagaatcccatcatccacaagaaaggcagcattctggtaaatcgtacctatgaagcggaggaaaaggaccaatttggtaatattcagattgtccgtaagaacatccctgaaaatatctatcaagaattatataaatatttcaacgataagtcggacaaggaacttagcgatgaagccgcgaagttgaaaaatgttgttggtcaccacgaagcagcaacaaacattgtgaaagactatcgctacacttacgataagtactttttacatatgcctattacgattaactttaaggcaaataagacaggttttatcaacgaccgtatcctgcaatatattgcaaaagagaaggacctgcatgtcattgggattgatcgcggtgaacgcaatctgatttacgtgagtgttattgatacctgcggtaatattgttgagcaaaagtcttttaatatcgttaatggttacgactaccaaattaagcttaaacaacaggaaggtgcccgccagatcgcccgtaaggagtggaaggaaatcggaaaaattaaggaaatcaaagagggatatctgagcttggttattcatgaaatctcaaagatggttattaagtacaacgccatcatcgctatggaagacttatcgtatgggtttaaaaagggtcgtttcaaagttgagcgccaggtctaccaaaagtttgaaacgatgcttattaataaattaaactacttggttttcaaagatatctctattaccgagaatggaggtttactgaaaggataccagttaacgtatatccccgataagcttaaaaacgtgggccatcagtgtggctgtattttctatgtgcccgcggcatatacatcaaaaattgacccgacgacgggtttcgttaatatcttcaagttcaaagatctgacagttgatgcaaaacgcgaattcattaagaagttcgatagtattcgctatgactccgagaaaaatttgttttgcttcacttttgactacaataactttattactcagaatacagtcatgagtaaaagctcctggtcggtttacacgtacggggtacgcatcaaacgtcgttttgtgaatggtcgttttagtaatgagtcggatacaattgatattaccaaggatatggagaagactctggaaatgacagacatcaattggcgtgatggacatgatttgcgtcaggacattatcgactatgagattgtgcagcatattttcgaaatttttcgcctgacggtgcaaatgcgtaattccttaagcgaactggaagatcgcgactatgaccgcttaatttctcctgtgctgaatgagaacaacatcttctatgactcagcgaaagccggggacgctttgccaaaggatgcagatgctaacggtgcatattgtattgctctgaaaggcctttacgagatcaaacaaattactgaaaactggaaggaagatggaaagttttcccgtgataaattgaagatctctaataaggactggtttgactttatccaaaataaacgttattta

SEQ ID NO: 12 - protein, 1263 aa, synthetic construct
MNNGTNNFQNFIGISSLQKTLRNALIPTETTQQFIVKNGQIKEDELRGENRQILKDIMDDYYRGFISETLSSIDDIDWTSLFEKMEIQLKNGDNKDTLIKEQTEYRKAIHKKFANDDRFKNMFSAKLISDILPEFVIHNNNYSASEKEEKTQVIKLFSRFATSFKDYFKNRANCFSADDISSSSCHRIVNDNAEIFFSNALVYRRIVKSLSNDDINKISGDMKDSLKEMSLEEIYSYEKYGEFITQEGISFYNDICGKVNSFMNLYCQKNKENKNLYKLQKLHKQILCIADTSYEVPYKFESDEEVYQSVNGFLDNISSKHIVERLRKIGDNYNGYNLDKIYIVSKFYESVSQKTYRDWETINTALEIHYNNILPGNGKSKADKVKKAVKNDLQKSITEINELVSNYKLCSDDNIKAETYIHEISHILNNFEAQELKYNPEIHLVESELKASELKNVLDVIMNAFHWCSVFMTEELVDKDNNFYAELEEIYDEIYPVISLYNLVRNYVTQKPYSTKKIKLNFGIPTLADGWSKSKEYSNNAIILMRDNLYYLGIFNAKNKPDKKIIEGNTSENKGDYKKMIYNLLPGPNKMIPKVFLSSKTGVETYKPSAYILEGYKQNKHIKSSKDFDITFCHDLIDYFKNCIAIHPEWKNFGFDFSDTSTYEDISGFYREVELQGYKIDWTYISEKDIDLLQEKGQLYLFQIYNKDFSKKSTGNDNLHTMYLKNLFSEENLKDIVLKLNGEAEIFFRKSSIKNPIIHKKGSILVNRTYEAEEKDQFGNIQIVRKNIPENIYQELYKYFNDKSDKELSDEAAKLKNVVGHHEAATNIVKDYRYTYDKYFLHMPITINFKANKTGFINDRILQYIAKEKDLHVIGIDRGERNLIYVSVIDTCGNIVEQKSFNIVNGYDYQIKLKQQEGARQIARKEWKEIGKIKEIKEGYLSLVIHEISKMVIKYNAIIAMEDLSYGFKKGRFKVERQVYQKFETMLINKLNYLVFKDISITENGGLLKGYQLTYIPDKLKNVGHQCGCIFYVPAAYTSKIDPTTGFVNIFKFKDLTVDAKREFIKKFDSIRYDSEKNLFCFTFDYNNFITQNTVMSKSSWSVYTYGVRIKRRFVNGRFSNESDTIDITKDMEKTLEMTDINWRDGHDLRQDIIDYEIVQHIFEIFRLTVQMRNSLSELEDRDYDRLISPVLNENNIFYDSAKAGDALPKDADANGAYCIALKGLYEIKQITENWKEDGKFSRDKLKISNKDWFDFIQNKRYL

SEQ ID NO: 13 - DNA, 3789 bp, synthetic construct
  source 1..3789: mol_type = other DNA
atgaataacggtaccaataactttcaaaattttatcgggatctcctcgttgcaaaaaactcttcgtaatgctttaatcccgactgagacaacacagcagttcatcgttaaaaacggcatcattaaagaagatgagctgcgcggcgagaaccgtcagattttaaagcgtatcatggacgactattaccgtgggttcatctcagaaacattaagcagcatcgatgatatcgactggacctcactgtttgagaagatggagattcaacttaagaatggagacaacaaagacactttaattaaggagcagacggaatatcgtaaagctatccataaaaaatttgcaaacgatgaccgtttcaaaaatatgttttccgcaaaattgattagcgacattttacctgaattcgtaatccataacaacaactattccgcatctgaaaaagaggagaagacccaagttatcaaacttttttcacgtttcgcgacatcttttaaagactactttaagaatcgtgcgaattgtttcagtgcagatgatatttcgtctagttcatgtcaccgtatcgtgaatgacaacgctgagattttcttttctaatgcgttggtgtatcgccgcatcgtaaagtccttgtcgaatgatgatatcaacaaaattagtggtgacatgaaagactccctgaaagaaatgtcattagaggagatttacagctacgaaaaatacggagagttcatcactcaggaaggtatctccttttacaacgatatttgcggcaaagttaatagtttcatgaatctgtattgtcagaagaataaggaaaacaagaatctgtacaagttacaaaagcttcataaacagatcttgtgcatcgccgacacgtcttatgaagtcccgtataaatttgaaagcgacgaagaagtatatcagagtgtgaatggattcttggacaatatctcatcaaaacacattgttgaacgtttgcgcaaaatcggcgacaactataacggatacaacttggataaaatttatatcgtatcaaaattttatgaatcagtatcccaaaagacttaccgtgattgggagactattaatacggcgttagaaatccattacaacaacattctgccgggtaacggtaaatcgaaagcggacaaagtgaagaaggcggttaagaacgatcttcagaagtctatcacggagattaatgagctggtttccaattacaagttgtgctcggatgataacatcaaagctgaaacctatatccatgaaatttctcatattcttaataacttcgaggcacaagaattaaaatataacccagaaattcatctggttgagagcgaacttaaagcttcagaattaaaaaatgttttggacgtaattatgaacgccttccattggtgcagcgtgtttatgacagaggagttagtagataaggataacaacttttatgcagaattggaagagatctatgatgagatctatccagtgatttcactgtataacttagtccgtaattacgtcactcagaagccgtactcaactaaaaagatcaagttaaattttggaattccgacattggcggatggttggagtaagtctaaggaatactcaaataacgctattatcttaatgcgtgacaacctgtattacttgggtattttcaatgccaaaaataagcccgataaaaaaatcattgaagggaatacttcagaaaataagggagattacaaaaaaatgatttataaccttttgccaggcccaaacaaaatgatccccaaggtgtttttgagtagtaagacgggagtagaaacatataagccatcagcgtacattcttgaagggtacaaacaaaataaacacatcaagagcagcaaggactttgacattacattttgtcatgacttaatcgactactttaaaaattgcattgccattcaccctgagtggaaaaattttggtttcgacttcagtgatacctctacctatgaagatatctctggtttttatcgtgaggtagaacttcagggttacaagatcgattggacgtacatttccgagaaagacattgatcttttacaagagaagggtcagctttacttatttcagatctacaataaagacttttcgaaaaaatccacgggcaacgacaaccttcatacaatgtacttaaagaacctgttctctgaagaaaacttgaaagatatcgtgcttaaattgaatggcgaggccgagatttttttccgtaaaagctcgattaagaatcccatcatccacaagaaaggcagcattctggtaaatcgtacctatgaagcggaggaaaaggaccaatttggtaatattcagattgtccgtaagaacatccctgaaaatatctatcaagaattatataaatatttcaacgataagtcggacaaggaacttagcgatgaagccgcgaagttgaaaaatgttgttggtcaccacgaagcagcaacaaacattgtgaaagactatcgctacacttacgataagtactttttacatatgcctattacgattaactttaaggcaaataagacaggttttatcaacgaccgtatcctgcaatatattgcaaaagagaaggacctgcatgtcattgggattgatcgcggtgaacgcaatctgatttacgtgagtgttattgatacctgcggtaatattgttgagcaaaagtcttttaatatcgttaatggttacgactaccaaattaagcttaaacaacaggaaggtgcccgccagatcgcccgtaaggagtggaaggaaatcggaaaaattaaggaaatcaaagagggatatctgagcttggttattcatgaaatctcaaagatggttattaagtacaacgccatcatcgctatggaagacttatcgtatgggtttaaaaagggtcgtttcaaagttgagcgccaggtctaccaaaagtttgaaacgatgcttattaataaattaaactacttggttttcaaagatatctctattaccgagaatggaggtttactgaaaggataccagttaacgtatatccccgataagcttaaaaacgtgggccatcagtgtggctgtattttctatgtgcccgcggcatatacatcaaaaattgacccgacgacgggtttcgttaatatcttcaagttcaaagatctgacagttgatgcaaaacgcgaattcattaagaagttcgatagtattcgctatgactccgagaaaaatttgttttgcttcacttttgactacaataactttattactcagaatacagtcatgagtaaaagctcctggtcggtttacacgtacggggtacgcatcaaacgtcgttttgtgaatggtcgttttagtaatgagtcggatacaattgatattaccaaggatatggagaagactctggaaatgacagacatcaattggcgtgatggacatgatttgcgtcaggacattatcgactatgagattgtgcagcatattttcgaaatttttcgcctgacggtgcaaatgcgtaattccttaagcgaactggaagatcgcgactatgaccgcttaatttctcctgtgctgaatgagaacaacatcttctatgactcagcgaaagccggggacgctttgccaaaggatgcagatgctaacggtgcatattgtattgctctgaaaggcctttacgagatcaaacaaattactgaaaactggaaggaagatggaaagttttcccgtgataaattgaagatctctaataaggactggtttgactttatccaaaataaacgttattta

SEQ ID NO: 14 - protein, 1263 aa, synthetic construct
MNNGTNNFQNFIGISSLQKTLRNALIPTETTQQFIVKNGIIKEDELRGENRQILKRIMDDYYRGFISETLSSIDDIDWTSLFEKMEIQLKNGDNKDTLIKEQTEYRKAIHKKFANDDRFKNMFSAKLISDILPEFVIHNNNYSASEKEEKTQVIKLFSRFATSFKDYFKNRANCFSADDISSSSCHRIVNDNAEIFFSNALVYRRIVKSLSNDDINKISGDMKDSLKEMSLEEIYSYEKYGEFITQEGISFYNDICGKVNSFMNLYCQKNKENKNLYKLQKLHKQILCIADTSYEVPYKFESDEEVYQSVNGFLDNISSKHIVERLRKIGDNYNGYNLDKIYIVSKFYESVSQKTYRDWETINTALEIHYNNILPGNGKSKADKVKKAVKNDLQKSITEINELVSNYKLCSDDNIKAETYIHEISHILNNFEAQELKYNPEIHLVESELKASELKNVLDVIMNAFHWCSVFMTEELVDKDNNFYAELEEIYDEIYPVISLYNLVRNYVTQKPYSTKKIKLNFGIPTLADGWSKSKEYSNNAIILMRDNLYYLGIFNAKNKPDKKIIEGNTSENKGDYKKMIYNLLPGPNKMIPKVFLSSKTGVETYKPSAYILEGYKQNKHIKSSKDFDITFCHDLIDYFKNCIAIHPEWKNFGFDFSDTSTYEDISGFYREVELQGYKIDWTYISEKDIDLLQEKGQLYLFQIYNKDFSKKSTGNDNLHTMYLKNLFSEENLKDIVLKLNGEAEIFFRKSSIKNPIIHKKGSILVNRTYEAEEKDQFGNIQIVRKNIPENIYQELYKYFNDKSDKELSDEAAKLKNVVGHHEAATNIVKDYRYTYDKYFLHMPITINFKANKTGFINDRILQYIAKEKDLHVIGIDRGERNLIYVSVIDTCGNIVEQKSFNIVNGYDYQIKLKQQEGARQIARKEWKEIGKIKEIKEGYLSLVIHEISKMVIKYNAIIAMEDLSYGFKKGRFKVERQVYQKFETMLINKLNYLVFKDISITENGGLLKGYQLTYIPDKLKNVGHQCGCIFYVPAAYTSKIDPTTGFVNIFKFKDLTVDAKREFIKKFDSIRYDSEKNLFCFTFDYNNFITQNTVMSKSSWSVYTYGVRIKRRFVNGRFSNESDTIDITKDMEKTLEMTDINWRDGHDLRQDIIDYEIVQHIFEIFRLTVQMRNSLSELEDRDYDRLISPVLNENNIFYDSAKAGDALPKDADANGAYCIALKGLYEIKQITENWKEDGKFSRDKLKISNKDWFDFIQNKRYL

SEQ ID NO: 15 - DNA, 3789 bp, synthetic construct
  source 1..3789: mol_type = other DNA
atgaataacggtaccaataactttcaaaattttatcgggatctcctcgttgcaaaaaactcttcgtaatgctttaatcccgactgagacaacacagcagttcatcgttaaaaacggcatcattaaagaagatgagctgcgcggcgagaaccgtcagattttaaagccgatcatggacgactattaccgtgggttcatctcagaaacattaagcagcatcgatgatatcgactggacctcactgtttgagaagatggagattcaacttaagaatggagacaacaaagacactttaattaaggagcagacggaatatcgtaaagctatccataaaaaatttgcaaacgatgaccgtttcaaaaatatgttttccgcaaaattgattagcgacattttacctgaattcgtaatccataacaacaactattccgcatctgaaaaagaggagaagacccaagttatcaaacttttttcacgtttcgcgacatcttttaaagactactttaagaatcgtgcgaattgtttcagtgcagatgatatttcgtctagttcatgtcaccgtatcgtgaatgacaacgctgagattttcttttctaatgcgttggtgtatcgccgcatcgtaaagtccttgtcgaatgatgatatcaacaaaattagtggtgacatgaaagactccctgaaagaaatgtcattagaggagatttacagctacgaaaaatacggagagttcatcactcaggaaggtatctccttttacaacgatatttgcggcaaagttaatagtttcatgaatctgtattgtcagaagaataaggaaaacaagaatctgtacaagttacaaaagcttcataaacagatcttgtgcatcgccgacacgtcttatgaagtcccgtataaatttgaaagcgacgaagaagtatatcagagtgtgaatggattcttggacaatatctcatcaaaacacattgttgaacgtttgcgcaaaatcggcgacaactataacggatacaacttggataaaatttatatcgtatcaaaattttatgaatcagtatcccaaaagacttaccgtgattgggagactattaatacggcgttagaaatccattacaacaacattctgccgggtaacggtaaatcgaaagcggacaaagtgaagaaggcggttaagaacgatcttcagaagtctatcacggagattaatgagctggtttccaattacaagttgtgctcggatgataacatcaaagctgaaacctatatccatgaaatttctcatattcttaataacttcgaggcacaagaattaaaatataacccagaaattcatctggttgagagcgaacttaaagcttcagaattaaaaaatgttttggacgtaattatgaacgccttccattggtgcagcgtgtttatgacagaggagttagtagataaggataacaacttttatgcagaattggaagagatctatgatgagatctatccagtgatttcactgtataacttagtccgtaattacgtcactcagaagccgtactcaactaaaaagatcaagttaaattttggaattccgacattggcggatggttggagtaagtctaaggaatactcaaataacgctattatcttaatgcgtgacaacctgtattacttgggtattttcaatgccaaaaataagcccgataaaaaaatcattgaagggaatacttcagaaaataagggagattacaaaaaaatgatttataaccttttgccaggcccaaacaaaatgatccccaaggtgtttttgagtagtaagacgggagtagaaacatataagccatcagcgtacattcttgaagggtacaaacaaaataaacacatcaagagcagcaaggactttgacattacattttgtcatgacttaatcgactactttaaaaattgcattgccattcaccctgagtggaaaaattttggtttcgacttcagtgatacctctacctatgaagatatctctggtttttatcgtgaggtagaacttcagggttacaagatcgattggacgtacatttccgagaaagacattgatcttttacaagagaagggtcagctttacttatttcagatctacaataaagacttttcgaaaaaatccacgggcaacgacaaccttcatacaatgtacttaaagaacctgttctctgaagaaaacttgaaagatatcgtgcttaaattgaatggcgaggccgagatttttttccgtaaaagctcgattaagaatcccatcatccacaagaaaggcagcattctggtaaatcgtacctatgaagcggaggaaaaggaccaatttggtaatattcagattgtccgtaagaacatccctgaaaatatctatcaagaattatataaatatttcaacgataagtcggacaaggaacttagcgatgaagccgcgaagttgaaaaatgttgttggtcaccacgaagcagcaacaaacattgtgaaagactatcgctacacttacgataagtactttttacatatgcctattacgattaactttaaggcaaataagacaggttttatcaacgaccgtatcctgcaatatattgcaaaagagaaggacctgcatgtcattgggattgatcgcggtgaacgcaatctgatttacgtgagtgttattgatacctgcggtaatattgttgagcaaaagtcttttaatatcgttaatggttacgactaccaaattaagcttaaacaacaggaaggtgcccgccagatcgcccgtaaggagtggaaggaaatcggaaaaattaaggaaatcaaagagggatatctgagcttggttattcatgaaatctcaaagatggttattaagtacaacgccatcatcgctatggaagacttatcgtatgggtttaaaaagggtcgtttcaaagttgagcgccaggtctaccaaaagtttgaaacgatgcttattaataaattaaactacttggttttcaaagatatctctattaccgagaatggaggtttactgaaaggataccagttaacgtatatccccgataagcttaaaaacgtgggccatcagtgtggctgtattttctatgtgcccgcggcatatacatcaaaaattgacccgacgacgggtttcgttaatatcttcaagttcaaagatctgacagttgatgcaaaacgcgaattcattaagaagttcgatagtattcgctatgactccgagaaaaatttgttttgcttcacttttgactacaataactttattactcagaatacagtcatgagtaaaagctcctggtcggtttacacgtacggggtacgcatcaaacgtcgttttgtgaatggtcgttttagtaatgagtcggatacaattgatattaccaaggatatggagaagactctggaaatgacagacatcaattggcgtgatggacatgatttgcgtcaggacattatcgactatgagattgtgcagcatattttcgaaatttttcgcctgacggtgcaaatgcgtaattccttaagcgaactggaagatcgcgactatgaccgcttaatttctcctgtgctgaatgagaacaacatcttctatgactcagcgaaagccggggacgctttgccaaaggatgcagatgctaacggtgcatattgtattgctctgaaaggcctttacgagatcaaacaaattactgaaaactggaaggaagatggaaagttttcccgtgataaattgaagatctctaataaggactggtttgactttatccaaaataaacgttattta

SEQ ID NO: 16 - protein, 1263 aa, synthetic construct
MNNGTNNFQNFIGISSLQKTLRNALIPTETTQQFIVKNGIIKEDELRGENRQILKPIMDDYYRGFISETLSSIDDIDWTSLFEKMEIQLKNGDNKDTLIKEQTEYRKAIHKKFANDDRFKNMFSAKLISDILPEFVIHNNNYSASEKEEKTQVIKLFSRFATSFKDYFKNRANCFSADDISSSSCHRIVNDNAEIFFSNALVYRRIVKSLSNDDINKISGDMKDSLKEMSLEEIYSYEKYGEFITQEGISFYNDICGKVNSFMNLYCQKNKENKNLYKLQKLHKQILCIADTSYEVPYKFESDEEVYQSVNGFLDNISSKHIVERLRKIGDNYNGYNLDKIYIVSKFYESVSQKTYRDWETINTALEIHYNNILPGNGKSKADKVKKAVKNDLQKSITEINELVSNYKLCSDDNIKAETYIHEISHILNNFEAQELKYNPEIHLVESELKASELKNVLDVIMNAFHWCSVFMTEELVDKDNNFYAELEEIYDEIYPVISLYNLVRNYVTQKPYSTKKIKLNFGIPTLADGWSKSKEYSNNAIILMRDNLYYLGIFNAKNKPDKKIIEGNTSENKGDYKKMIYNLLPGPNKMIPKVFLSSKTGVETYKPSAYILEGYKQNKHIKSSKDFDITFCHDLIDYFKNCIAIHPEWKNFGFDFSDTSTYEDISGFYREVELQGYKIDWTYISEKDIDLLQEKGQLYLFQIYNKDFSKKSTGNDNLHTMYLKNLFSEENLKDIVLKLNGEAEIFFRKSSIKNPIIHKKGSILVNRTYEAEEKDQFGNIQIVRKNIPENIYQELYKYFNDKSDKELSDEAAKLKNVVGHHEAATNIVKDYRYTYDKYFLHMPITINFKANKTGFINDRILQYIAKEKDLHVIGIDRGERNLIYVSVIDTCGNIVEQKSFNIVNGYDYQIKLKQQEGARQIARKEWKEIGKIKEIKEGYLSLVIHEISKMVIKYNAIIAMEDLSYGFKKGRFKVERQVYQKFETMLINKLNYLVFKDISITENGGLLKGYQLTYIPDKLKNVGHQCGCIFYVPAAYTSKIDPTTGFVNIFKFKDLTVDAKREFIKKFDSIRYDSEKNLFCFTFDYNNFITQNTVMSKSSWSVYTYGVRIKRRFVNGRFSNESDTIDITKDMEKTLEMTDINWRDGHDLRQDIIDYEIVQHIFEIFRLTVQMRNSLSELEDRDYDRLISPVLNENNIFYDSAKAGDALPKDADANGAYCIALKGLYEIKQITENWKEDGKFSRDKLKISNKDWFDFIQNKRYL

SEQ ID NO: 17 - DNA, 3789 bp, synthetic construct
  source 1..3789: mol_type = other DNA
atgaataacggtaccaataactttcaaaattttatcgggatctcctcgttgcaaaaaactcttcgtaatgctttaatcccgactgagacaacacagcagttcatcgttaaaaacggcatcattaaagaagatgagctgcgcggcgagaaccgtcagattttaaaggacatcatgcgtgactattaccgtgggttcatctcagaaacattaagcagcatcgatgatatcgactggacctcactgtttgagaagatggagattcaacttaagaatggagacaacaaagacactttaattaaggagcagacggaatatcgtaaagctatccataaaaaatttgcaaacgatgaccgtttcaaaaatatgttttccgcaaaattgattagcgacattttacctgaattcgtaatccataacaacaactattccgcatctgaaaaagaggagaagacccaagttatcaaacttttttcacgtttcgcgacatcttttaaagactactttaagaatcgtgcgaattgtttcagtgcagatgatatttcgtctagttcatgtcaccgtatcgtgaatgacaacgctgagattttcttttctaatgcgttggtgtatcgccgcatcgtaaagtccttgtcgaatgatgatatcaacaaaattagtggtgacatgaaagactccctgaaagaaatgtcattagaggagatttacagctacgaaaaatacggagagttcatcactcaggaaggtatctccttttacaacgatatttgcggcaaagttaatagtttcatgaatctgtattgtcagaagaataaggaaaacaagaatctgtacaagttacaaaagcttcataaacagatcttgtgcatcgccgacacgtcttatgaagtcccgtataaatttgaaagcgacgaagaagtatatcagagtgtgaatggattcttggacaatatctcatcaaaacacattgttgaacgtttgcgcaaaatcggcgacaactataacggatacaacttggataaaatttatatcgtatcaaaattttatgaatcagtatcccaaaagacttaccgtgattgggagactattaatacggcgttagaaatccattacaacaacattctgccgggtaacggtaaatcgaaagcggacaaagtgaagaaggcggttaagaacgatcttcagaagtctatcacggagattaatgagctggtttccaattacaagttgtgctcggatgataacatcaaagctgaaacctatatccatgaaatttctcatattcttaataacttcgaggcacaagaattaaaatataacccagaaattcatctggttgagagcgaacttaaagcttcagaattaaaaaatgttttggacgtaattatgaacgccttccattggtgcagcgtgtttatgacagaggagttagtagataaggataacaacttttatgcagaattggaagagatctatgatgagatctatccagtgatttcactgtataacttagtccgtaattacgtcactcagaagccgtactcaactaaaaagatcaagttaaattttggaattccgacattggcggatggttggagtaagtctaaggaatactcaaataacgctattatcttaatgcgtgacaacctgtattacttgggtattttcaatgccaaaaataagcccgataaaaaaatcattgaagggaatacttcagaaaataagggagattacaaaaaaatgatttataaccttttgccaggcccaaacaaaatgatccccaaggtgtttttgagtagtaagacgggagtagaaacatataagccatcagcgtacattcttgaagggtacaaacaaaataaacacatcaagagcagcaaggactttgacattacattttgtcatgacttaatcgactactttaaaaattgcattgccattcaccctgagtggaaaaattttggtttcgacttcagtgatacctctacctatgaagatatctctggtttttatcgtgaggtagaacttcagggttacaagatcgattggacgtacatttccgagaaagacattgatcttttacaagagaagggtcagctttacttatttcagatctacaataaagacttttcgaaaaaatccacgggcaacgacaaccttcatacaatgtacttaaagaacctgttctctgaagaaaacttgaaagatatcgtgcttaaattgaatggcgaggccgagatttttttccgtaaaagctcgattaagaatcccatcatccacaagaaaggcagcattctggtaaatcgtacctatgaagcggaggaaaaggaccaatttggtaatattcagattgtccgtaagaacatccctgaaaatatctatcaagaattatataaatatttcaacgataagtcggacaaggaacttagcgatgaagccgcgaagttgaaaaatgttgttggtcaccacgaagcagcaacaaacattgtgaaagactatcgctacacttacgataagtactttttacatatgcctattacgattaactttaaggcaaataagacaggttttatcaacgaccgtatcctgcaatatattgcaaaagagaaggacctgcatgtcattgggattgatcgcggtgaacgcaatctgatttacgtgagtgttattgatacctgcggtaatattgttgagcaaaagtcttttaatatcgttaatggttacgactaccaaattaagcttaaacaacaggaaggtgcccgccagatcgcccgtaaggagtggaaggaaatcggaaaaattaaggaaatcaaagagggatatctgagcttggttattcatgaaatctcaaagatggttattaagtacaacgccatcatcgctatggaagacttatcgtatgggtttaaaaagggtcgtttcaaagttgagcgccaggtctaccaaaagtttgaaacgatgcttattaataaattaaactacttggttttcaaagatatctctattaccgagaatggaggtttactgaaaggataccagttaacgtatatccccgataagcttaaaaacgtgggccatcagtgtggctgtattttctatgtgcccgcggcatatacatcaaaaattgacccgacgacgggtttcgttaatatcttcaagttcaaagatctgacagttgatgcaaaacgcgaattcattaagaagttcgatagtattcgctatgactccgagaaaaatttgttttgcttcacttttgactacaataactttattactcagaatacagtcatgagtaaaagctcctggtcggtttacacgtacggggtacgcatcaaacgtcgttttgtgaatggtcgttttagtaatgagtcggatacaattgatattaccaaggatatggagaagactctggaaatgacagacatcaattggcgtgatggacatgatttgcgtcaggacattatcgactatgagattgtgcagcatattttcgaaatttttcgcctgacggtgcaaatgcgtaattccttaagcgaactggaagatcgcgactatgaccgcttaatttctcctgtgctgaatgagaacaacatcttctatgactcagcgaaagccggggacgctttgccaaaggatgcagatgctaacggtgcatattgtattgctctgaaaggcctttacgagatcaaacaaattactgaaaactggaaggaagatggaaagttttcccgtgataaattgaagatctctaataaggactggtttgactttatccaaaataaacgttattta

SEQ ID NO: 18 - protein, 1263 aa, synthetic construct
MNNGTNNFQNFIGISSLQKTLRNALIPTETTQQFIVKNGIIKEDELRGENRQILKDIMRDYYRGFISETLSSIDDIDWTSLFEKMEIQLKNGDNKDTLIKEQTEYRKAIHKKFANDDRFKNMFSAKLISDILPEFVIHNNNYSASEKEEKTQVIKLFSRFATSFKDYFKNRANCFSADDISSSSCHRIVNDNAEIFFSNALVYRRIVKSLSNDDINKISGDMKDSLKEMSLEEIYSYEKYGEFITQEGISFYNDICGKVNSFMNLYCQKNKENKNLYKLQKLHKQILCIADTSYEVPYKFESDEEVYQSVNGFLDNISSKHIVERLRKIGDNYNGYNLDKIYIVSKFYESVSQKTYRDWETINTALEIHYNNILPGNGKSKADKVKKAVKNDLQKSITEINELVSNYKLCSDDNIKAETYIHEISHILNNFEAQELKYNPEIHLVESELKASELKNVLDVIMNAFHWCSVFMTEELVDKDNNFYAELEEIYDEIYPVISLYNLVRNYVTQKPYSTKKIKLNFGIPTLADGWSKSKEYSNNAIILMRDNLYYLGIFNAKNKPDKKIIEGNTSENKGDYKKMIYNLLPGPNKMIPKVFLSSKTGVETYKPSAYILEGYKQNKHIKSSKDFDITFCHDLIDYFKNCIAIHPEWKNFGFDFSDTSTYEDISGFYREVELQGYKIDWTYISEKDIDLLQEKGQLYLFQIYNKDFSKKSTGNDNLHTMYLKNLFSEENLKDIVLKLNGEAEIFFRKSSIKNPIIHKKGSILVNRTYEAEEKDQFGNIQIVRKNIPENIYQELYKYFNDKSDKELSDEAAKLKNVVGHHEAATNIVKDYRYTYDKYFLHMPITINFKANKTGFINDRILQYIAKEKDLHVIGIDRGERNLIYVSVIDTCGNIVEQKSFNIVNGYDYQIKLKQQEGARQIARKEWKEIGKIKEIKEGYLSLVIHEISKMVIKYNAIIAMEDLSYGFKKGRFKVERQVYQKFETMLINKLNYLVFKDISITENGGLLKGYQLTYIPDKLKNVGHQCGCIFYVPAAYTSKIDPTTGFVNIFKFKDLTVDAKREFIKKFDSIRYDSEKNLFCFTFDYNNFITQNTVMSKSSWSVYTYGVRIKRRFVNGRFSNESDTIDITKDMEKTLEMTDINWRDGHDLRQDIIDYEIVQHIFEIFRLTVQMRNSLSELEDRDYDRLISPVLNENNIFYDSAKAGDALPKDADANGAYCIALKGLYEIKQITENWKEDGKFSRDKLKISNKDWFDFIQNKRYL

SEQ ID NO: 19 - DNA, 3789 bp, synthetic construct
  source 1..3789: mol_type = other DNA
atgaataacggtaccaataactttcaaaattttatcgggatctcctcgttgcaaaaaactcttcgtaatgctttaatcccgactgagacaacacagcagttcatcgttaaaaacggcatcattaaagaagatgagctgcgcggcgagaaccgtcagattttaaaggacatcatggcggactattaccgtgggttcatctcagaaacattaagcagcatcgatgatatcgactggacctcactgtttgagaagatggagattcaacttaagaatggagacaacaaagacactttaattaaggagcagacggaatatcgtaaagctatccataaaaaatttgcaaacgatgaccgtttcaaaaatatgttttccgcaaaattgattagcgacattttacctgaattcgtaatccataacaacaactattccgcatctgaaaaagaggagaagacccaagttatcaaacttttttcacgtttcgcgacatcttttaaagactactttaagaatcgtgcgaattgtttcagtgcagatgatatttcgtctagttcatgtcaccgtatcgtgaatgacaacgctgagattttcttttctaatgcgttggtgtatcgccgcatcgtaaagtccttgtcgaatgatgatatcaacaaaattagtggtgacatgaaagactccctgaaagaaatgtcattagaggagatttacagctacgaaaaatacggagagttcatcactcaggaaggtatctccttttacaacgatatttgcggcaaagttaatagtttcatgaatctgtattgtcagaagaataaggaaaacaagaatctgtacaagttacaaaagcttcataaacagatcttgtgcatcgccgacacgtcttatgaagtcccgtataaatttgaaagcgacgaagaagtatatcagagtgtgaatggattcttggacaatatctcatcaaaacacattgttgaacgtttgcgcaaaatcggcgacaactataacggatacaacttggataaaatttatatcgtatcaaaattttatgaatcagtatcccaaaagacttaccgtgattgggagactattaatacggcgttagaaatccattacaacaacattctgccgggtaacggtaaatcgaaagcggacaaagtgaagaaggcggttaagaacgatcttcagaagtctatcacggagattaatgagctggtttccaattacaagttgtgctcggatgataacatcaaagctgaaacctatatccatgaaatttctcatattcttaataacttcgaggcacaagaattaaaatataacccagaaattcatctggttgagagcgaacttaaagcttcagaattaaaaaatgttttggacgtaattatgaacgccttccattggtgcagcgtgtttatgacagaggagttagtagataaggataacaacttttatgcagaattggaagagatctatgatgagatctatccagtgatttcactgtataacttagtccgtaattacgtcactcagaagccgtactcaactaaaaagatcaagttaaattttggaattccgacattggcggatggttggagtaagtctaaggaatactcaaataacgctattatcttaatgcgtgacaacctgtattacttgggtattttcaatgccaaaaataagcccgataaaaaaatcattgaagggaatacttcagaaaataagggagattacaaaaaaatgatttataaccttttgccaggcccaaacaaaatgatccccaaggtgtttttgagtagtaagacgggagtagaaacatataagccatcagcgtacattcttgaagggtacaaacaaaataaacacatcaagagcagcaaggactttgacattacattttgtcatgacttaatcgactactttaaaaattgcattgccattcaccctgagtggaaaaattttggtttcgacttcagtgatacctctacctatgaagatatctctggtttttatcgtgaggtagaacttcagggttacaagatcgattggacgtacatttccgagaaagacattgatcttttacaagagaagggtcagctttacttatttcagatctacaataaagacttttcgaaaaaatccacgggcaacgacaaccttcatacaatgtacttaaagaacctgttctctgaagaaaacttgaaagatatcgtgcttaaattgaatggcgaggccgagatttttttccgtaaaagctcgattaagaatcccatcatccacaagaaaggcagcattctggtaaatcgtacctatgaagcggaggaaaaggaccaatttggtaatattcagattgtccgtaagaacatccctgaaaatatctatcaagaattatataaatatttcaacgataagtcggacaaggaacttagcgatgaagccgcgaagttgaaaaatgttgttggtcaccacgaagcagcaacaaacattgtgaaagactatcgctacacttacgataagtactttttacatatgcctattacgattaactttaaggcaaataagacaggttttatcaacgaccgtatcctgcaatatattgcaaaagagaaggacctgcatgtcattgggattgatcgcggtgaacgcaatctgatttacgtgagtgttattgatacctgcggtaatattgttgagcaaaagtcttttaatatcgttaatggttacgactaccaaattaagcttaaacaacaggaaggtgcccgccagatcgcccgtaaggagtggaaggaaatcggaaaaattaaggaaatcaaagagggatatctgagcttggttattcatgaaatctcaaagatggttattaagtacaacgccatcatcgctatggaagacttatcgtatgggtttaaaaagggtcgtttcaaagttgagcgccaggtctaccaaaagtttgaaacgatgcttattaataaattaaactacttggttttcaaagatatctctattaccgagaatggaggtttactgaaaggataccagttaacgtatatccccgataagcttaaaaacgtgggccatcagtgtggctgtattttctatgtgcccgcggcatatacatcaaaaattgacccgacgacgggtttcgttaatatcttcaagttcaaagatctgacagttgatgcaaaacgcgaattcattaagaagttcgatagtattcgctatgactccgagaaaaatttgttttgcttcacttttgactacaataactttattactcagaatacagtcatgagtaaaagctcctggtcggtttacacgtacggggtacgcatcaaacgtcgttttgtgaatggtcgttttagtaatgagtcggatacaattgatattaccaaggatatggagaagactctggaaatgacagacatcaattggcgtgatggacatgatttgcgtcaggacattatcgactatgagattgtgcagcatattttcgaaatttttcgcctgacggtgcaaatgcgtaattccttaagcgaactggaagatcgcgactatgaccgcttaatttctcctgtgctgaatgagaacaacatcttctatgactcagcgaaagccggggacgctttgccaaaggatgcagatgctaacggtgcatattgtattgctctgaaaggcctttacgagatcaaacaaattactgaaaactggaaggaagatggaaagttttcccgtgataaattgaagatctctaataaggactggtttgactttatccaaaataaacgttattta

SEQ ID NO: 20 - protein, 1263 aa, synthetic construct
MNNGTNNFQNFIGISSLQKTLRNALIPTETTQQFIVKNGIIKEDELRGENRQILKDIMADYYRGFISETLSSIDDIDWTSLFEKMEIQLKNGDNKDTLIKEQTEYRKAIHKKFANDDRFKNMFSAKLISDILPEFVIHNNNYSASEKEEKTQVIKLFSRFATSFKDYFKNRANCFSADDISSSSCHRIVNDNAEIFFSNALVYRRIVKSLSNDDINKISGDMKDSLKEMSLEEIYSYEKYGEFITQEGISFYNDICGKVNSFMNLYCQKNKENKNLYKLQKLHKQILCIADTSYEVPYKFESDEEVYQSVNGFLDNISSKHIVERLRKIGDNYNGYNLDKIYIVSKFYESVSQKTYRDWETINTALEIHYNNILPGNGKSKADKVKKAVKNDLQKSITEINELVSNYKLCSDDNIKAETYIHEISHILNNFEAQELKYNPEIHLVESELKASELKNVLDVIMNAFHWCSVFMTEELVDKDNNFYAELEEIYDEIYPVISLYNLVRNYVTQKPYSTKKIKLNFGIPTLADGWSKSKEYSNNAIILMRDNLYYLGIFNAKNKPDKKIIEGNTSENKGDYKKMIYNLLPGPNKMIPKVFLSSKTGVETYKPSAYILEGYKQNKHIKSSKDFDITFCHDLIDYFKNCIAIHPEWKNFGFDFSDTSTYEDISGFYREVELQGYKIDWTYISEKDIDLLQEKGQLYLFQIYNKDFSKKSTGNDNLHTMYLKNLFSEENLKDIVLKLNGEAEIFFRKSSIKNPIIHKKGSILVNRTYEAEEKDQFGNIQIVRKNIPENIYQELYKYFNDKSDKELSDEAAKLKNVVGHHEAATNIVKDYRYTYDKYFLHMPITINFKANKTGFINDRILQYIAKEKDLHVIGIDRGERNLIYVSVIDTCGNIVEQKSFNIVNGYDYQIKLKQQEGARQIARKEWKEIGKIKEIKEGYLSLVIHEISKMVIKYNAIIAMEDLSYGFKKGRFKVERQVYQKFETMLINKLNYLVFKDISITENGGLLKGYQLTYIPDKLKNVGHQCGCIFYVPAAYTSKIDPTTGFVNIFKFKDLTVDAKREFIKKFDSIRYDSEKNLFCFTFDYNNFITQNTVMSKSSWSVYTYGVRIKRRFVNGRFSNESDTIDITKDMEKTLEMTDINWRDGHDLRQDIIDYEIVQHIFEIFRLTVQMRNSLSELEDRDYDRLISPVLNENNIFYDSAKAGDALPKDADANGAYCIALKGLYEIKQITENWKEDGKFSRDKLKISNKDWFDFIQNKRYL

SEQ ID NO: 21 - DNA, 3789 bp, synthetic construct
  source 1..3789: mol_type = other DNA
atgaataacggtaccaataactttcaaaattttatcgggatctcctcgttgcaaaaaactcttcgtaatgctttaatcccgactgagacaacacagcagttcatcgttaaaaacggcatcattaaagaagatgagctgcgcggcgagaaccgtcagattttaaaggacatcatggacgactattaccgtgggttcatctcagaaacattaagcagcatcgatgatatcgactggacctcactgtttgagaagatggagattcaacttaagaatggagacaacaaagacactttaattaaggagcagacggaatatcgtaaagctatccataaaaaatttgcaaacgatgaccgtttcaaaaatatgttttccgcaaaattgattagcgacattttacctgaattcgtaatccataacaacaactattccgcatctgaaaaagaggagaagacccaagttatcaaactttttggccgtttcgcgacatcttttaaagactactttaagaatcgtgcgaattgtttcagtgcagatgatatttcgtctagttcatgtcaccgtatcgtgaatgacaacgctgagattttcttttctaatgcgttggtgtatcgccgcatcgtaaagtccttgtcgaatgatgatatcaacaaaattagtggtgacatgaaagactccctgaaagaaatgtcattagaggagatttacagctacgaaaaatacggagagttcatcactcaggaaggtatctccttttacaacgatatttgcggcaaagttaatagtttcatgaatctgtattgtcagaagaataaggaaaacaagaatctgtacaagttacaaaagcttcataaacagatcttgtgcatcgccgacacgtcttatgaagtcccgtataaatttgaaagcgacgaagaagtatatcagagtgtgaatggattcttggacaatatctcatcaaaacacattgttgaacgtttgcgcaaaatcggcgacaactataacggatacaacttggataaaatttatatcgtatcaaaattttatgaatcagtatcccaaaagacttaccgtgattgggagactattaatacggcgttagaaatccattacaacaacattctgccgggtaacggtaaatcgaaagcggacaaagtgaagaaggcggttaagaacgatcttcagaagtctatcacggagattaatgagctggtttccaattacaagttgtgctcggatgataacatcaaagctgaaacctatatccatgaaatttctcatattcttaataacttcgaggcacaagaattaaaatataacccagaaattcatctggttgagagcgaacttaaagcttcagaattaaaaaatgttttggacgtaattatgaacgccttccattggtgcagcgtgtttatgacagaggagttagtagataaggataacaacttttatgcagaattggaagagatctatgatgagatctatccagtgatttcactgtataacttagtccgtaattacgtcactcagaagccgtactcaactaaaaagatcaagttaaattttggaattccgacattggcggatggttggagtaagtctaaggaatactcaaataacgctattatcttaatgcgtgacaacctgtattacttgggtattttcaatgccaaaaataagcccgataaaaaaatcattgaagggaatacttcagaaaataagggagattacaaaaaaatgatttataaccttttgccaggcccaaacaaaatgatccccaaggtgtttttgagtagtaagacgggagtagaaacatataagccatcagcgtacattcttgaagggtacaaacaaaataaacacatcaagagcagcaaggactttgacattacattttgtcatgacttaatcgactactttaaaaattgcattgccattcaccctgagtggaaaaattttggtttcgacttcagtgatacctctacctatgaagatatctctggtttttatcgtgaggtagaacttcagggttacaagatcgattggacgtacatttccgagaaagacattgatcttttacaagagaagggtcagctttacttatttcagatctacaataaagacttttcgaaaaaatccacgggcaacgacaaccttcatacaatgtacttaaagaacctgttctctgaagaaaacttgaaagatatcgtgcttaaattgaatggcgaggccgagatttttttccgtaaaagctcgattaagaatcccatcatccacaagaaaggcagcattctggtaaatcgtacctatgaagcggaggaaaaggaccaatttggtaatattcagattgtccgtaagaacatccctgaaaatatctatcaagaattatataaatatttcaacgataagtcggacaaggaacttagcgatgaagccgcgaagttgaaaaatgttgttggtcaccacgaagcagcaacaaacattgtgaaagactatcgctacacttacgataagtactttttacatatgcctattacgattaactttaaggcaaataagacaggttttatcaacgaccgtatcctgcaatatattgcaaaagagaaggacctgcatgtcattgggattgatcgcggtgaacgcaatctgatttacgtgagtgttattgatacctgcggtaatattgttgagcaaaagtcttttaatatcgttaatggttacgactaccaaattaagcttaaacaacaggaaggtgcccgccagatcgcccgtaaggagtggaaggaaatcggaaaaattaaggaaatcaaagagggatatctgagcttggttattcatgaaatctcaaagatggttattaagtacaacgccatcatcgctatggaagacttatcgtatgggtttaaaaagggtcgtttcaaagttgagcgccaggtctaccaaaagtttgaaacgatgcttattaataaattaaactacttggttttcaaagatatctctattaccgagaatggaggtttactgaaaggataccagttaacgtatatccccgataagcttaaaaacgtgggccatcagtgtggctgtattttctatgtgcccgcggcatatacatcaaaaattgacccgacgacgggtttcgttaatatcttcaagttcaaagatctgacagttgatgcaaaacgcgaattcattaagaagttcgatagtattcgctatgactccgagaaaaatttgttttgcttcacttttgactacaataactttattactcagaatacagtcatgagtaaaagctcctggtcggtttacacgtacggggtacgcatcaaacgtcgttttgtgaatggtcgttttagtaatgagtcggatacaattgatattaccaaggatatggagaagactctggaaatgacagacatcaattggcgtgatggacatgatttgcgtcaggacattatcgactatgagattgtgcagcatattttcgaaatttttcgcctgacggtgcaaatgcgtaattccttaagcgaactggaagatcgcgactatgaccgcttaatttctcctgtgctgaatgagaacaacatcttctatgactcagcgaaagccggggacgctttgccaaaggatgcagatgctaacggtgcatattgtattgctctgaaaggcctttacgagatcaaacaaattactgaaaactggaaggaagatggaaagttttcccgtgataaattgaagatctctaataaggactggtttgactttatccaaaataaacgttattta

SEQ ID NO: 22 - protein, 1263 aa, synthetic construct
MNNGTNNFQNFIGISSLQKTLRNALIPTETTQQFIVKNGIIKEDELRGENRQILKDIMDDYYRGFISETLSSIDDIDWTSLFEKMEIQLKNGDNKDTLIKEQTEYRKAIHKKFANDDRFKNMFSAKLISDILPEFVIHNNNYSASEKEEKTQVIKLFGRFATSFKDYFKNRANCFSADDISSSSCHRIVNDNAEIFFSNALVYRRIVKSLSNDDINKISGDMKDSLKEMSLEEIYSYEKYGEFITQEGISFYNDICGKVNSFMNLYCQKNKENKNLYKLQKLHKQILCIADTSYEVPYKFESDEEVYQSVNGFLDNISSKHIVERLRKIGDNYNGYNLDKIYIVSKFYESVSQKTYRDWETINTALEIHYNNILPGNGKSKADKVKKAVKNDLQKSITEINELVSNYKLCSDDNIKAETYIHEISHILNNFEAQELKYNPEIHLVESELKASELKNVLDVIMNAFHWCSVFMTEELVDKDNNFYAELEEIYDEIYPVISLYNLVRNYVTQKPYSTKKIKLNFGIPTLADGWSKSKEYSNNAIILMRDNLYYLGIFNAKNKPDKKIIEGNTSENKGDYKKMIYNLLPGPNKMIPKVFLSSKTGVETYKPSAYILEGYKQNKHIKSSKDFDITFCHDLIDYFKNCIAIHPEWKNFGFDFSDTSTYEDISGFYREVELQGYKIDWTYISEKDIDLLQEKGQLYLFQIYNKDFSKKSTGNDNLHTMYLKNLFSEENLKDIVLKLNGEAEIFFRKSSIKNPIIHKKGSILVNRTYEAEEKDQFGNIQIVRKNIPENIYQELYKYFNDKSDKELSDEAAKLKNVVGHHEAATNIVKDYRYTYDKYFLHMPITINFKANKTGFINDRILQYIAKEKDLHVIGIDRGERNLIYVSVIDTCGNIVEQKSFNIVNGYDYQIKLKQQEGARQIARKEWKEIGKIKEIKEGYLSLVIHEISKMVIKYNAIIAMEDLSYGFKKGRFKVERQVYQKFETMLINKLNYLVFKDISITENGGLLKGYQLTYIPDKLKNVGHQCGCIFYVPAAYTSKIDPTTGFVNIFKFKDLTVDAKREFIKKFDSIRYDSEKNLFCFTFDYNNFITQNTVMSKSSWSVYTYGVRIKRRFVNGRFSNESDTIDITKDMEKTLEMTDINWRDGHDLRQDIIDYEIVQHIFEIFRLTVQMRNSLSELEDRDYDRLISPVLNENNIFYDSAKAGDALPKDADANGAYCIALKGLYEIKQITENWKEDGKFSRDKLKISNKDWFDFIQNKRYL

SEQ ID NO: 23 - DNA, 3789 bp, synthetic construct
  source 1..3789: mol_type = other DNA
atgaataacggtaccaataactttcaaaattttatcgggatctcctcgttgcaaaaaactcttcgtaatgctttaatcccgactgagacaacacagcagttcatcgttaaaaacggcatcattaaagaagatgagctgcgcggcgagaaccgtcagattttaaaggacatcatggacgactattaccgtgggttcatctcagaaacattaagcagcatcgatgatatcgactggacctcactgtttgagaagatggagattcaacttaagaatggagacaacaaagacactttaattaaggagcagacggaatatcgtaaagctatccataaaaaatttgcaaacgatgaccgtttcaaaaatatgttttccgcaaaattgattagcgacattttacctgaattcgtaatccataacaacaactattccgcatctgaaaaagaggagaagacccaagttatcaaacttttttcacgtttcgcgacatctttttatgactactttaagaatcgtgcgaattgtttcagtgcagatgatatttcgtctagttcatgtcaccgtatcgtgaatgacaacgctgagattttcttttctaatgcgttggtgtatcgccgcatcgtaaagtccttgtcgaatgatgatatcaacaaaattagtggtgacatgaaagactccctgaaagaaatgtcattagaggagatttacagctacgaaaaatacggagagttcatcactcaggaaggtatctccttttacaacgatatttgcggcaaagttaatagtttcatgaatctgtattgtcagaagaataaggaaaacaagaatctgtacaagttacaaaagcttcataaacagatcttgtgcatcgccgacacgtcttatgaagtcccgtataaatttgaaagcgacgaagaagtatatcagagtgtgaatggattcttggacaatatctcatcaaaacacattgttgaacgtttgcgcaaaatcggcgacaactataacggatacaacttggataaaatttatatcgtatcaaaattttatgaatcagtatcccaaaagacttaccgtgattgggagactattaatacggcgttagaaatccattacaacaacattctgccgggtaacggtaaatcgaaagcggacaaagtgaagaaggcggttaagaacgatcttcagaagtctatcacggagattaatgagctggtttccaattacaagttgtgctcggatgataacatcaaagctgaaacctatatccatgaaatttctcatattcttaataacttcgaggcacaagaattaaaatataacccagaaattcatctggttgagagcgaacttaaagcttcagaattaaaaaatgttttggacgtaattatgaacgccttccattggtgcagcgtgtttatgacagaggagttagtagataaggataacaacttttatgcagaattggaagagatctatgatgagatctatccagtgatttcactgtataacttagtccgtaattacgtcactcagaagccgtactcaactaaaaagatcaagttaaattttggaattccgacattggcggatggttggagtaagtctaaggaatactcaaataacgctattatcttaatgcgtgacaacctgtattacttgggtattttcaatgccaaaaataagcccgataaaaaaatcattgaagggaatacttcagaaaataagggagattacaaaaaaatgatttataaccttttgccaggcccaaacaaaatgatccccaaggtgtttttgagtagtaagacgggagtagaaacatataagccatcagcgtacattcttgaagggtacaaacaaaataaacacatcaagagcagcaaggactttgacattacattttgtcatgacttaatcgactactttaaaaattgcattgccattcaccctgagtggaaaaattttggtttcgacttcagtgatacctctacctatgaagatatctctggtttttatcgtgaggtagaacttcagggttacaagatcgattggacgtacatttccgagaaagacattgatcttttacaagagaagggtcagctttacttatttcagatctacaataaagacttttcgaaaaaatccacgggcaacgacaaccttcatacaatgtacttaaagaacctgttctctgaagaaaacttgaaagatatcgtgcttaaattgaatggcgaggccgagatttttttccgtaaaagctcgattaagaatcccatcatccacaagaaaggcagcattctggtaaatcgtacctatgaagcggaggaaaaggaccaatttggtaatattcagattgtccgtaagaacatccctgaaaatatctatcaagaattatataaatatttcaacgataagtcggacaaggaacttagcgatgaagccgcgaagttgaaaaatgttgttggtcaccacgaagcagcaacaaacattgtgaaagactatcgctacacttacgataagtactttttacatatgcctattacgattaactttaaggcaaataagacaggttttatcaacgaccgtatcctgcaatatattgcaaaagagaaggacctgcatgtcattgggattgatcgcggtgaacgcaatctgatttacgtgagtgttattgatacctgcggtaatattgttgagcaaaagtcttttaatatcgttaatggttacgactaccaaattaagcttaaacaacaggaaggtgcccgccagatcgcccgtaaggagtggaaggaaatcggaaaaattaaggaaatcaaagagggatatctgagcttggttattcatgaaatctcaaagatggttattaagtacaacgccatcatcgctatggaagacttatcgtatgggtttaaaaagggtcgtttcaaagttgagcgccaggtctaccaaaagtttgaaacgatgcttattaataaattaaactacttggttttcaaagatatctctattaccgagaatggaggtttactgaaaggataccagttaacgtatatccccgataagcttaaaaacgtgggccatcagtgtggctgtattttctatgtgcccgcggcatatacatcaaaaattgacccgacgacgggtttcgttaatatcttcaagttcaaagatctgacagttgatgcaaaacgcgaattcattaagaagttcgatagtattcgctatgactccgagaaaaatttgttttgcttcacttttgactacaataactttattactcagaatacagtcatgagtaaaagctcctggtcggtttacacgtacggggtacgcatcaaacgtcgttttgtgaatggtcgttttagtaatgagtcggatacaattgatattaccaaggatatggagaagactctggaaatgacagacatcaattggcgtgatggacatgatttgcgtcaggacattatcgactatgagattgtgcagcatattttcgaaatttttcgcctgacggtgcaaatgcgtaattccttaagcgaactggaagatcgcgactatgaccgcttaatttctcctgtgctgaatgagaacaacatcttctatgactcagcgaaagccggggacgctttgccaaaggatgcagatgctaacggtgcatattgtattgctctgaaaggcctttacgagatcaaacaaattactgaaaactggaaggaagatggaaagttttcccgtgataaattgaagatctctaataaggactggtttgactttatccaaaataaacgttattta

SEQ ID NO: 24 - protein, 1263 aa, synthetic construct
MNNGTNNFQNFIGISSLQKTLRNALIPTETTQQFIVKNGIIKEDELRGENRQILKDIMDDYYRGFISETLSSIDDIDWTSLFEKMEIQLKNGDNKDTLIKEQTEYRKAIHKKFANDDRFKNMFSAKLISDILPEFVIHNNNYSASEKEEKTQVIKLFSRFATSFYDYFKNRANCFSADDISSSSCHRIVNDNAEIFFSNALVYRRIVKSLSNDDINKISGDMKDSLKEMSLEEIYSYEKYGEFITQEGISFYNDICGKVNSFMNLYCQKNKENKNLYKLQKLHKQILCIADTSYEVPYKFESDEEVYQSVNGFLDNISSKHIVERLRKIGDNYNGYNLDKIYIVSKFYESVSQKTYRDWETINTALEIHYNNILPGNGKSKADKVKKAVKNDLQKSITEINELVSNYKLCSDDNIKAETYIHEISHILNNFEAQELKYNPEIHLVESELKASELKNVLDVIMNAFHWCSVFMTEELVDKDNNFYAELEEIYDEIYPVISLYNLVRNYVTQKPYSTKKIKLNFGIPTLADGWSKSKEYSNNAIILMRDNLYYLGIFNAKNKPDKKIIEGNTSENKGDYKKMIYNLLPGPNKMIPKVFLSSKTGVETYKPSAYILEGYKQNKHIKSSKDFDITFCHDLIDYFKNCIAIHPEWKNFGFDFSDTSTYEDISGFYREVELQGYKIDWTYISEKDIDLLQEKGQLYLFQIYNKDFSKKSTGNDNLHTMYLKNLFSEENLKDIVLKLNGEAEIFFRKSSIKNPIIHKKGSILVNRTYEAEEKDQFGNIQIVRKNIPENIYQELYKYFNDKSDKELSDEAAKLKNVVGHHEAATNIVKDYRYTYDKYFLHMPITINFKANKTGFINDRILQYIAKEKDLHVIGIDRGERNLIYVSVIDTCGNIVEQKSFNIVNGYDYQIKLKQQEGARQIARKEWKEIGKIKEIKEGYLSLVIHEISKMVIKYNAIIAMEDLSYGFKKGRFKVERQVYQKFETMLINKLNYLVFKDISITENGGLLKGYQLTYIPDKLKNVGHQCGCIFYVPAAYTSKIDPTTGFVNIFKFKDLTVDAKREFIKKFDSIRYDSEKNLFCFTFDYNNFITQNTVMSKSSWSVYTYGVRIKRRFVNGRFSNESDTIDITKDMEKTLEMTDINWRDGHDLRQDIIDYEIVQHIFEIFRLTVQMRNSLSELEDRDYDRLISPVLNENNIFYDSAKAGDALPKDADANGAYCIALKGLYEIKQITENWKEDGKFSRDKLKISNKDWFDFIQNKRYL

SEQ ID NO: 25 - DNA, 3789 bp, synthetic construct
  source 1..3789: mol_type = other DNA
atgaataacggtaccaataactttcaaaattttatcgggatctcctcgttgcaaaaaactcttcgtaatgctttaatcccgactgagacaacacagcagttcatcgttaaaaacggcatcattaaagaagatgagctgcgcggcgagaaccgtcagattttaaaggacatcatggacgactattaccgtgggttcatctcagaaacattaagcagcatcgatgatatcgactggacctcactgtttgagaagatggagattcaacttaagaatggagacaacaaagacactttaattaaggagcagacggaatatcgtaaagctatccataaaaaatttgcaaacgatgaccgtttcaaaaatatgttttccgcaaaattgattagcgacattttacctgaattcgtaatccataacaacaactattccgcatctgaaaaagaggagaagacccaagttatcaaacttttttcacgtttcgcgacatcttttaaagactactttaagaatcgtgcgaattgtttcagtgcagatgatattgtgtctagttcatgtcaccgtatcgtgaatgacaacgctgagattttcttttctaatgcgttggtgtatcgccgcatcgtaaagtccttgtcgaatgatgatatcaacaaaattagtggtgacatgaaagactccctgaaagaaatgtcattagaggagatttacagctacgaaaaatacggagagttcatcactcaggaaggtatctccttttacaacgatatttgcggcaaagttaatagtttcatgaatctgtattgtcagaagaataaggaaaacaagaatctgtacaagttacaaaagcttcataaacagatcttgtgcatcgccgacacgtcttatgaagtcccgtataaatttgaaagcgacgaagaagtatatcagagtgtgaatggattcttggacaatatctcatcaaaacacattgttgaacgtttgcgcaaaatcggcgacaactataacggatacaacttggataaaatttatatcgtatcaaaattttatgaatcagtatcccaaaagacttaccgtgattgggagactattaatacggcgttagaaatccattacaacaacattctgccgggtaacggtaaatcgaaagcggacaaagtgaagaaggcggttaagaacgatcttcagaagtctatcacggagattaatgagctggtttccaattacaagttgtgctcggatgataacatcaaagctgaaacctatatccatgaaatttctcatattcttaataacttcgaggcacaagaattaaaatataacccagaaattcatctggttgagagcgaacttaaagcttcagaattaaaaaatgttttggacgtaattatgaacgccttccattggtgcagcgtgtttatgacagaggagttagtagataaggataacaacttttatgcagaattggaagagatctatgatgagatctatccagtgatttcactgtataacttagtccgtaattacgtcactcagaagccgtactcaactaaaaagatcaagttaaattttggaattccgacattggcggatggttggagtaagtctaaggaatactcaaataacgctattatcttaatgcgtgacaacctgtattacttgggtattttcaatgccaaaaataagcccgataaaaaaatcattgaagggaatacttcagaaaataagggagattacaaaaaaatgatttataaccttttgccaggcccaaacaaaatgatccccaaggtgtttttgagtagtaagacgggagtagaaacatataagccatcagcgtacattcttgaagggtacaaacaaaataaacacatcaagagcagcaaggactttgacattacattttgtcatgacttaatcgactactttaaaaattgcattgccattcaccctgagtggaaaaattttggtttcgacttcagtgatacctctacctatgaagatatctctggtttttatcgtgaggtagaacttcagggttacaagatcgattggacgtacatttccgagaaagacattgatcttttacaagagaagggtcagctttacttatttcagatctacaataaagacttttcgaaaaaatccacgggcaacgacaaccttcatacaatgtacttaaagaacctgttctctgaagaaaacttgaaagatatcgtgcttaaattgaatggcgaggccgagatttttttccgtaaaagctcgattaagaatcccatcatccacaagaaaggcagcattctggtaaatcgtacctatgaagcggaggaaaaggaccaatttggtaatattcagattgtccgtaagaacatccctgaaaatatctatcaagaattatataaatatttcaacgataagtcggacaaggaacttagcgatgaagccgcgaagttgaaaaatgttgttggtcaccacgaagcagcaacaaacattgtgaaagactatcgctacacttacgataagtactttttacatatgcctattacgattaactttaaggcaaataagacaggttttatcaacgaccgtatcctgcaatatattgcaaaagagaaggacctgcatgtcattgggattgatcgcggtgaacgcaatctgatttacgtgagtgttattgatacctgcggtaatattgttgagcaaaagtcttttaatatcgttaatggttacgactaccaaattaagcttaaacaacaggaaggtgcccgccagatcgcccgtaaggagtggaaggaaatcggaaaaattaaggaaatcaaagagggatatctgagcttggttattcatgaaatctcaaagatggttattaagtacaacgccatcatcgctatggaagacttatcgtatgggtttaaaaagggtcgtttcaaagttgagcgccaggtctaccaaaagtttgaaacgatgcttattaataaattaaactacttggttttcaaagatatctctattaccgagaatggaggtttactgaaaggataccagttaacgtatatccccgataagcttaaaaacgtgggccatcagtgtggctgtattttctatgtgcccgcggcatatacatcaaaaattgacccgacgacgggtttcgttaatatcttcaagttcaaagatctgacagttgatgcaaaacgcgaattcattaagaagttcgatagtattcgctatgactccgagaaaaatttgttttgcttcacttttgactacaataactttattactcagaatacagtcatgagtaaaagctcctggtcggtttacacgtacggggtacgcatcaaacgtcgttttgtgaatggtcgttttagtaatgagtcggatacaattgatattaccaaggatatggagaagactctggaaatgacagacatcaattggcgtgatggacatgatttgcgtcaggacattatcgactatgagattgtgcagcatattttcgaaatttttcgcctgacggtgcaaatgcgtaattccttaagcgaactggaagatcgcgactatgaccgcttaatttctcctgtgctgaatgagaacaacatcttctatgactcagcgaaagccggggacgctttgccaaaggatgcagatgctaacggtgcatattgtattgctctgaaaggcctttacgagatcaaacaaattactgaaaactggaaggaagatggaaagttttcccgtgataaattgaagatctctaataaggactggtttgactttatccaaaataaacgttattta

SEQ ID NO: 26 - protein, 1263 aa, synthetic construct
MNNGTNNFQNFIGISSLQKTLRNALIPTETTQQFIVKNGIIKEDELRGENRQILKDIMDDYYRGFISETLSSIDDIDWTSLFEKMEIQLKNGDNKDTLIKEQTEYRKAIHKKFANDDRFKNMFSAKLISDILPEFVIHNNNYSASEKEEKTQVIKLFSRFATSFKDYFKNRANCFSADDIVSSSCHRIVNDNAEIFFSNALVYRRIVKSLSNDDINKISGDMKDSLKEMSLEEIYSYEKYGEFITQEGISFYNDICGKVNSFMNLYCQKNKENKNLYKLQKLHKQILCIADTSYEVPYKFESDEEVYQSVNGFLDNISSKHIVERLRKIGDNYNGYNLDKIYIVSKFYESVSQKTYRDWETINTALEIHYNNILPGNGKSKADKVKKAVKNDLQKSITEINELVSNYKLCSDDNIKAETYIHEISHILNNFEAQELKYNPEIHLVESELKASELKNVLDVIMNAFHWCSVFMTEELVDKDNNFYAELEEIYDEIYPVISLYNLVRNYVTQKPYSTKKIKLNFGIPTLADGWSKSKEYSNNAIILMRDNLYYLGIFNAKNKPDKKIIEGNTSENKGDYKKMIYNLLPGPNKMIPKVFLSSKTGVETYKPSAYILEGYKQNKHIKSSKDFDITFCHDLIDYFKNCIAIHPEWKNFGFDFSDTSTYEDISGFYREVELQGYKIDWTYISEKDIDLLQEKGQLYLFQIYNKDFSKKSTGNDNLHTMYLKNLFSEENLKDIVLKLNGEAEIFFRKSSIKNPIIHKKGSILVNRTYEAEEKDQFGNIQIVRKNIPENIYQELYKYFNDKSDKELSDEAAKLKNVVGHHEAATNIVKDYRYTYDKYFLHMPITINFKANKTGFINDRILQYIAKEKDLHVIGIDRGERNLIYVSVIDTCGNIVEQKSFNIVNGYDYQIKLKQQEGARQIARKEWKEIGKIKEIKEGYLSLVIHEISKMVIKYNAIIAMEDLSYGFKKGRFKVERQVYQKFETMLINKLNYLVFKDISITENGGLLKGYQLTYIPDKLKNVGHQCGCIFYVPAAYTSKIDPTTGFVNIFKFKDLTVDAKREFIKKFDSIRYDSEKNLFCFTFDYNNFITQNTVMSKSSWSVYTYGVRIKRRFVNGRFSNESDTIDITKDMEKTLEMTDINWRDGHDLRQDIIDYEIVQHIFEIFRLTVQMRNSLSELEDRDYDRLISPVLNENNIFYDSAKAGDALPKDADANGAYCIALKGLYEIKQITENWKEDGKFSRDKLKISNKDWFDFIQNKRYL

SEQ ID NO: 27 - DNA, 3789 bp, synthetic construct
  source 1..3789: mol_type = other DNA
atgaataacggtaccaataactttcaaaattttatcgggatctcctcgttgcaaaaaactcttcgtaatgctttaatcccgactgagacaacacagcagttcatcgttaaaaacggcatcattaaagaagatgagctgcgcggcgagaaccgtcagattttaaaggacatcatggacgactattaccgtgggttcatctcagaaacattaagcagcatcgatgatatcgactggacctcactgtttgagaagatggagattcaacttaagaatggagacaacaaagacactttaattaaggagcagacggaatatcgtaaagctatccataaaaaatttgcaaacgatgaccgtttcaaaaatatgttttccgcaaaattgattagcgacattttacctgaattcgtaatccataacaacaactattccgcatctgaaaaagaggagaagacccaagttatcaaacttttttcacgtttcgcgacatcttttaaagactactttaagaatcgtgcgaattgtttcagtgcagatgatatttcgtctagttcatgtcaccgtatcgtgaatgacaacgctgagattttcttttctaatgcgttggtgtatcgccgcatcgtaaagtccttgtcgaatgatgatatcaacaaaattagtggtgacatgaaagactccctgaaagaaatgtcattagaggagatttacagctacgaaaaatacggagagttcatcactcaggaaggtatctccttttacaacgatatttgcggcaaagttaatagtttcatgaatctgtattgtcagaagaataaggaaaacaagaatctgtacaagttacaaaagcttcataaacagatcttgtgcatcaaagacacgtcttatgaagtcccgtataaatttgaaagcgacgaagaagtatatcagagtgtgaatggattcttggacaatatctcatcaaaacacattgttgaacgtttgcgcaaaatcggcgacaactataacggatacaacttggataaaatttatatcgtatcaaaattttatgaatcagtatcccaaaagacttaccgtgattgggagactattaatacggcgttagaaatccattacaacaacattctgccgggtaacggtaaatcgaaagcggacaaagtgaagaaggcggttaagaacgatcttcagaagtctatcacggagattaatgagctggtttccaattacaagttgtgctcggatgataacatcaaagctgaaacctatatccatgaaatttctcatattcttaataacttcgaggcacaagaattaaaatataacccagaaattcatctggttgagagcgaacttaaagcttcagaattaaaaaatgttttggacgtaattatgaacgccttccattggtgcagcgtgtttatgacagaggagttagtagataaggataacaacttttatgcagaattggaagagatctatgatgagatctatccagtgatttcactgtataacttagtccgtaattacgtcactcagaagccgtactcaactaaaaagatcaagttaaattttggaattccgacattggcggatggttggagtaagtctaaggaatactcaaataacgctattatcttaatgcgtgacaacctgtattacttgggtattttcaatgccaaaaataagcccgataaaaaaatcattgaagggaatacttcagaaaataagggagattacaaaaaaatgatttataaccttttgccaggcccaaacaaaatgatccccaaggtgtttttgagtagtaagacgggagtagaaacatataagccatcagcgtacattcttgaagggtacaaacaaaataaacacatcaagagcagcaaggactttgacattacattttgtcatgacttaatcgactactttaaaaattgcattgccattcaccctgagtggaaaaattttggtttcgacttcagtgatacctctacctatgaagatatctctggtttttatcgtgaggtagaacttcagggttacaagatcgattggacgtacatttccgagaaagacattgatcttttacaagagaagggtcagctttacttatttcagatctacaataaagacttttcgaaaaaatccacgggcaacgacaaccttcatacaatgtacttaaagaacctgttctctgaagaaaacttgaaagatatcgtgcttaaattgaatggcgaggccgagatttttttccgtaaaagctcgattaagaatcccatcatccacaagaaaggcagcattctggtaaatcgtacctatgaagcggaggaaaaggaccaatttggtaatattcagattgtccgtaagaacatccctgaaaatatctatcaagaattatataaatatttcaacgataagtcggacaaggaacttagcgatgaagccgcgaagttgaaaaatgttgttggtcaccacgaagcagcaacaaacattgtgaaagactatcgctacacttacgataagtactttttacatatgcctattacgattaactttaaggcaaataagacaggttttatcaacgaccgtatcctgcaatatattgcaaaagagaaggacctgcatgtcattgggattgatcgcggtgaacgcaatctgatttacgtgagtgttattgatacctgcggtaatattgttgagcaaaagtcttttaatatcgttaatggttacgactaccaaattaagcttaaacaacaggaaggtgcccgccagatcgcccgtaaggagtggaaggaaatcggaaaaattaaggaaatcaaagagggatatctgagcttggttattcatgaaatctcaaagatggttattaagtacaacgccatcatcgctatggaagacttatcgtatgggtttaaaaagggtcgtttcaaagttgagcgccaggtctaccaaaagtttgaaacgatgcttattaataaattaaactacttggttttcaaagatatctctattaccgagaatggaggtttactgaaaggataccagttaacgtatatccccgataagcttaaaaacgtgggccatcagtgtggctgtattttctatgtgcccgcggcatatacatcaaaaattgacccgacgacgggtttcgttaatatcttcaagttcaaagatctgacagttgatgcaaaacgcgaattcattaagaagttcgatagtattcgctatgactccgagaaaaatttgttttgcttcacttttgactacaataactttattactcagaatacagtcatgagtaaaagctcctggtcggtttacacgtacggggtacgcatcaaacgtcgttttgtgaatggtcgttttagtaatgagtcggatacaattgatattaccaaggatatggagaagactctggaaatgacagacatcaattggcgtgatggacatgatttgcgtcaggacattatcgactatgagattgtgcagcatattttcgaaatttttcgcctgacggtgcaaatgcgtaattccttaagcgaactggaagatcgcgactatgaccgcttaatttctcctgtgctgaatgagaacaacatcttctatgactcagcgaaagccggggacgctttgccaaaggatgcagatgctaacggtgcatattgtattgctctgaaaggcctttacgagatcaaacaaattactgaaaactggaaggaagatggaaagttttcccgtgataaattgaagatctctaataaggactggtttgactttatccaaaataaacgttattta

SEQ ID NO: 28 - protein, 1263 aa, synthetic construct
MNNGTNNFQNFIGISSLQKTLRNALIPTETTQQFIVKNGIIKEDELRGENRQILKDIMDDYYRGFISETLSSIDDIDWTSLFEKMEIQLKNGDNKDTLIKEQTEYRKAIHKKFANDDRFKNMFSAKLISDILPEFVIHNNNYSASEKEEKTQVIKLFSRFATSFKDYFKNRANCFSADDISSSSCHRIVNDNAEIFFSNALVYRRIVKSLSNDDINKISGDMKDSLKEMSLEEIYSYEKYGEFITQEGISFYNDICGKVNSFMNLYCQKNKENKNLYKLQKLHKQILCIKDTSYEVPYKFESDEEVYQSVNGFLDNISSKHIVERLRKIGDNYNGYNLDKIYIVSKFYESVSQKTYRDWETINTALEIHYNNILPGNGKSKADKVKKAVKNDLQKSITEINELVSNYKLCSDDNIKAETYIHEISHILNNFEAQELKYNPEIHLVESELKASELKNVLDVIMNAFHWCSVFMTEELVDKDNNFYAELEEIYDEIYPVISLYNLVRNYVTQKPYSTKKIKLNFGIPTLADGWSKSKEYSNNAIILMRDNLYYLGIFNAKNKPDKKIIEGNTSENKGDYKKMIYNLLPGPNKMIPKVFLSSKTGVETYKPSAYILEGYKQNKHIKSSKDFDITFCHDLIDYFKNCIAIHPEWKNFGFDFSDTSTYEDISGFYREVELQGYKIDWTYISEKDIDLLQEKGQLYLFQIYNKDFSKKSTGNDNLHTMYLKNLFSEENLKDIVLKLNGEAEIFFRKSSIKNPIIHKKGSILVNRTYEAEEKDQFGNIQIVRKNIPENIYQELYKYFNDKSDKELSDEAAKLKNVVGHHEAATNIVKDYRYTYDKYFLHMPITINFKANKTGFINDRILQYIAKEKDLHVIGIDRGERNLIYVSVIDTCGNIVEQKSFNIVNGYDYQIKLKQQEGARQIARKEWKEIGKIKEIKEGYLSLVIHEISKMVIKYNAIIAMEDLSYGFKKGRFKVERQVYQKFETMLINKLNYLVFKDISITENGGLLKGYQLTYIPDKLKNVGHQCGCIFYVPAAYTSKIDPTTGFVNIFKFKDLTVDAKREFIKKFDSIRYDSEKNLFCFTFDYNNFITQNTVMSKSSWSVYTYGVRIKRRFVNGRFSNESDTIDITKDMEKTLEMTDINWRDGHDLRQDIIDYEIVQHIFEIFRLTVQMRNSLSELEDRDYDRLISPVLNENNIFYDSAKAGDALPKDADANGAYCIALKGLYEIKQITENWKEDGKFSRDKLKISNKDWFDFIQNKRYL

SEQ ID NO: 29 - DNA, 3789 bp, synthetic construct
  source 1..3789: mol_type = other DNA
atgaataacggtaccaataactttcaaaattttatcgggatctcctcgttgcaaaaaactcttcgtaatgctttaatcccgactgagacaacacagcagttcatcgttaaaaacggcatcattaaagaagatgagctgcgcggcgagaaccgtcagattttaaaggacatcatggacgactattaccgtgggttcatctcagaaacattaagcagcatcgatgatatcgactggacctcactgtttgagaagatggagattcaacttaagaatggagacaacaaagacactttaattaaggagcagacggaatatcgtaaagctatccataaaaaatttgcaaacgatgaccgtttcaaaaatatgttttccgcaaaattgattagcgacattttacctgaattcgtaatccataacaacaactattccgcatctgaaaaagaggagaagacccaagttatcaaacttttttcacgtttcgcgacatcttttaaagactactttaagaatcgtgcgaattgtttcagtgcagatgatatttcgtctagttcatgtcaccgtatcgtgaatgacaacgctgagattttcttttctaatgcgttggtgtatcgccgcatcgtaaagtccttgtcgaatgatgatatcaacaaaattagtggtgacatgaaagactccctgaaagaaatgtcattagaggagatttacagctacgaaaaatacggagagttcatcactcaggaaggtatctccttttacaacgatatttgcggcaaagttaatagtttcatgaatctgtattgtcagaagaataaggaaaacaagaatctgtacaagttacaaaagcttcataaacagatcttgtgcatcgccaccacgtcttatgaagtcccgtataaatttgaaagcgacgaagaagtatatcagagtgtgaatggattcttggacaatatctcatcaaaacacattgttgaacgtttgcgcaaaatcggcgacaactataacggatacaacttggataaaatttatatcgtatcaaaattttatgaatcagtatcccaaaagacttaccgtgattgggagactattaatacggcgttagaaatccattacaacaacattctgccgggtaacggtaaatcgaaagcggacaaagtgaagaaggcggttaagaacgatcttcagaagtctatcacggagattaatgagctggtttccaattacaagttgtgctcggatgataacatcaaagctgaaacctatatccatgaaatttctcatattcttaataacttcgaggcacaagaattaaaatataacccagaaattcatctggttgagagcgaacttaaagcttcagaattaaaaaatgttttggacgtaattatgaacgccttccattggtgcagcgtgtttatgacagaggagttagtagataaggataacaacttttatgcagaattggaagagatctatgatgagatctatccagtgatttcactgtataacttagtccgtaattacgtcactcagaagccgtactcaactaaaaagatcaagttaaattttggaattccgacattggcggatggttggagtaagtctaaggaatactcaaataacgctattatcttaatgcgtgacaacctgtattacttgggtattttcaatgccaaaaataagcccgataaaaaaatcattgaagggaatacttcagaaaataagggagattacaaaaaaatgatttataaccttttgccaggcccaaacaaaatgatccccaaggtgtttttgagtagtaagacgggagtagaaacatataagccatcagcgtacattcttgaagggtacaaacaaaataaacacatcaagagcagcaaggactttgacattacattttgtcatgacttaatcgactactttaaaaattgcattgccattcaccctgagtggaaaaattttggtttcgacttcagtgatacctctacctatgaagatatctctggtttttatcgtgaggtagaacttcagggttacaagatcgattggacgtacatttccgagaaagacattgatcttttacaagagaagggtcagctttacttatttcagatctacaataaagacttttcgaaaaaatccacgggcaacgacaaccttcatacaatgtacttaaagaacctgttctctgaagaaaacttgaaagatatcgtgcttaaattgaatggcgaggccgagatttttttccgtaaaagctcgattaagaatcccatcatccacaagaaaggcagcattctggtaaatcgtacctatgaagcggaggaaaaggaccaatttggtaatattcagattgtccgtaagaacatccctgaaaatatctatcaagaattatataaatatttcaacgataagtcggacaaggaacttagcgatgaagccgcgaagttgaaaaatgttgttggtcaccacgaagcagcaacaaacattgtgaaagactatcgctacacttacgataagtactttttacatatgcctattacgattaactttaaggcaaataagacaggttttatcaacgaccgtatcctgcaatatattgcaaaagagaaggacctgcatgtcattgggattgatcgcggtgaacgcaatctgatttacgtgagtgttattgatacctgcggtaatattgttgagcaaaagtcttttaatatcgttaatggttacgactaccaaattaagcttaaacaacaggaaggtgcccgccagatcgcccgtaaggagtggaaggaaatcggaaaaattaaggaaatcaaagagggatatctgagcttggttattcatgaaatctcaaagatggttattaagtacaacgccatcatcgctatggaagacttatcgtatgggtttaaaaagggtcgtttcaaagttgagcgccaggtctaccaaaagtttgaaacgatgcttattaataaattaaactacttggttttcaaagatatctctattaccgagaatggaggtttactgaaaggataccagttaacgtatatccccgataagcttaaaaacgtgggccatcagtgtggctgtattttctatgtgcccgcggcatatacatcaaaaattgacccgacgacgggtttcgttaatatcttcaagttcaaagatctgacagttgatgcaaaacgcgaattcattaagaagttcgatagtattcgctatgactccgagaaaaatttgttttgcttcacttttgactacaataactttattactcagaatacagtcatgagtaaaagctcctggtcggtttacacgtacggggtacgcatcaaacgtcgttttgtgaatggtcgttttagtaatgagtcggatacaattgatattaccaaggatatggagaagactctggaaatgacagacatcaattggcgtgatggacatgatttgcgtcaggacattatcgactatgagattgtgcagcatattttcgaaatttttcgcctgacggtgcaaatgcgtaattccttaagcgaactggaagatcgcgactatgaccgcttaatttctcctgtgctgaatgagaacaacatcttctatgactcagcgaaagccggggacgctttgccaaaggatgcagatgctaacggtgcatattgtattgctctgaaaggcctttacgagatcaaacaaattactgaaaactggaaggaagatggaaagttttcccgtgataaattgaagatctctaataaggactggtttgactttatccaaaataaacgttattta

SEQ ID NO: 30 - protein, 1263 aa, synthetic construct
MNNGTNNFQNFIGISSLQKTLRNALIPTETTQQFIVKNGIIKEDELRGENRQILKDIMDDYYRGFISETLSSIDDIDWTSLFEKMEIQLKNGDNKDTLIKEQTEYRKAIHKKFANDDRFKNMFSAKLISDILPEFVIHNNNYSASEKEEKTQVIKLFSRFATSFKDYFKNRANCFSADDISSSSCHRIVNDNAEIFFSNALVYRRIVKSLSNDDINKISGDMKDSLKEMSLEEIYSYEKYGEFITQEGISFYNDICGKVNSFMNLYCQKNKENKNLYKLQKLHKQILCIANTSYEVPYKFESDEEVYQSVNGFLDNISSKHIVERLRKIGDNYNGYNLDKIYIVSKFYESVSQKTYRDWETINTALEIHYNNILPGNGKSKADKVKKAVKNDLQKSITEINELVSNYKLCSDDNIKAETYIHEISHILNNFEAQELKYNPEIHLVESELKASELKNVLDVIMNAFHWCSVFMTEELVDKDNNFYAELEEIYDEIYPVISLYNLVRNYVTQKPYSTKKIKLNFGIPTLADGWSKSKEYSNNAIILMRDNLYYLGIFNAKNKPDKKIIEGNTSENKGDYKKMIYNLLPGPNKMIPKVFLSSKTGVETYKPSAYILEGYKQNKHIKSSKDFDITFCHDLIDYFKNCIAIHPEWKNFGFDFSDTSTYEDISGFYREVELQGYKIDWTYISEKDIDLLQEKGQLYLFQIYNKDFSKKSTGNDNLHTMYLKNLFSEENLKDIVLKLNGEAEIFFRKSSIKNPIIHKKGSILVNRTYEAEEKDQFGNIQIVRKNIPENIYQELYKYFNDKSDKELSDEAAKLKNVVGHHEAATNIVKDYRYTYDKYFLHMPITINFKANKTGFINDRILQYIAKEKDLHVIGIDRGERNLIYVSVIDTCGNIVEQKSFNIVNGYDYQIKLKQQEGARQIARKEWKEIGKIKEIKEGYLSLVIHEISKMVIKYNAIIAMEDLSYGFKKGRFKVERQVYQKFETMLINKLNYLVFKDISITENGGLLKGYQLTYIPDKLKNVGHQCGCIFYVPAAYTSKIDPTTGFVNIFKFKDLTVDAKREFIKKFDSIRYDSEKNLFCFTFDYNNFITQNTVMSKSSWSVYTYGVRIKRRFVNGRFSNESDTIDITKDMEKTLEMTDINWRDGHDLRQDIIDYEIVQHIFEIFRLTVQMRNSLSELEDRDYDRLISPVLNENNIFYDSAKAGDALPKDADANGAYCIALKGLYEIKQITENWKEDGKFSRDKLKISNKDWFDFIQNKRYL

SEQ ID NO: 31 - DNA, 3789 bp, synthetic construct
  source 1..3789: mol_type = other DNA
atgaataacggtaccaataactttcaaaattttatcgggatctcctcgttgcaaaaaactcttcgtaatgctttaatcccgactgagacaacacagcagttcatcgttaaaaacggcatcattaaagaagatgagctgcgcggcgagaaccgtcagattttaaaggacatcatggacgactattaccgtgggttcatctcagaaacattaagcagcatcgatgatatcgactggacctcactgtttgagaagatggagattcaacttaagaatggagacaacaaagacactttaattaaggagcagacggaatatcgtaaagctatccataaaaaatttgcaaacgatgaccgtttcaaaaatatgttttccgcaaaattgattagcgacattttacctgaattcgtaatccataacaacaactattccgcatctgaaaaagaggagaagacccaagttatcaaacttttttcacgtttcgcgacatcttttaaagactactttaagaatcgtgcgaattgtttcagtgcagatgatatttcgtctagttcatgtcaccgtatcgtgaatgacaacgctgagattttcttttctaatgcgttggtgtatcgccgcatcgtaaagtccttgtcgaatgatgatatcaacaaaattagtggtgacatgaaagactccctgaaagaaatgtcattagaggagatttacagctacgaaaaatacggagagttcatcactcaggaaggtatctccttttacaacgatatttgcggcaaagttaatagtttcatgaatctgtattgtcagaagaataaggaaaacaagaatctgtacaagttacaaaagcttcataaacagatcttgtgcatcgccgacacgtcttatgaacgtccgtataaatttgaaagcgacgaagaagtatatcagagtgtgaatggattcttggacaatatctcatcaaaacacattgttgaacgtttgcgcaaaatcggcgacaactataacggatacaacttggataaaatttatatcgtatcaaaattttatgaatcagtatcccaaaagacttaccgtgattgggagactattaatacggcgttagaaatccattacaacaacattctgccgggtaacggtaaatcgaaagcggacaaagtgaagaaggcggttaagaacgatcttcagaagtctatcacggagattaatgagctggtttccaattacaagttgtgctcggatgataacatcaaagctgaaacctatatccatgaaatttctcatattcttaataacttcgaggcacaagaattaaaatataacccagaaattcatctggttgagagcgaacttaaagcttcagaattaaaaaatgttttggacgtaattatgaacgccttccattggtgcagcgtgtttatgacagaggagttagtagataaggataacaacttttatgcagaattggaagagatctatgatgagatctatccagtgatttcactgtataacttagtccgtaattacgtcactcagaagccgtactcaactaaaaagatcaagttaaattttggaattccgacattggcggatggttggagtaagtctaaggaatactcaaataacgctattatcttaatgcgtgacaacctgtattacttgggtattttcaatgccaaaaataagcccgataaaaaaatcattgaagggaatacttcagaaaataagggagattacaaaaaaatgatttataaccttttgccaggcccaaacaaaatgatccccaaggtgtttttgagtagtaagacgggagtagaaacatataagccatcagcgtacattcttgaagggtacaaacaaaataaacacatcaagagcagcaaggactttgacattacattttgtcatgacttaatcgactactttaaaaattgcattgccattcaccctgagtggaaaaattttggtttcgacttcagtgatacctctacctatgaagatatctctggtttttatcgtgaggtagaacttcagggttacaagatcgattggacgtacatttccgagaaagacattgatcttttacaagagaagggtcagctttacttatttcagatctacaataaagacttttcgaaaaaatccacgggcaacgacaaccttcatacaatgtacttaaagaacctgttctctgaagaaaacttgaaagatatcgtgcttaaattgaatggcgaggccgagatttttttccgtaaaagctcgattaagaatcccatcatccacaagaaaggcagcattctggtaaatcgtacctatgaagcggaggaaaaggaccaatttggtaatattcagattgtccgtaagaacatccctgaaaatatctatcaagaattatataaatatttcaacgataagtcggacaaggaacttagcgatgaagccgcgaagttgaaaaatgttgttggtcaccacgaagcagcaacaaacattgtgaaagactatcgctacacttacgataagtactttttacatatgcctattacgattaactttaaggcaaataagacaggttttatcaacgaccgtatcctgcaatatattgcaaaagagaaggacctgcatgtcattgggattgatcgcggtgaacgcaatctgatttacgtgagtgttattgatacctgcggtaatattgttgagcaaaagtcttttaatatcgttaatggttacgactaccaaattaagcttaaacaacaggaaggtgcccgccagatcgcccgtaaggagtggaaggaaatcggaaaaattaaggaaatcaaagagggatatctgagcttggttattcatgaaatctcaaagatggttattaagtacaacgccatcatcgctatggaagacttatcgtatgggtttaaaaagggtcgtttcaaagttgagcgccaggtctaccaaaagtttgaaacgatgcttattaataaattaaactacttggttttcaaagatatctctattaccgagaatggaggtttactgaaaggataccagttaacgtatatccccgataagcttaaaaacgtgggccatcagtgtggctgtattttctatgtgcccgcggcatatacatcaaaaattgacccgacgacgggtttcgttaatatcttcaagttcaaagatctgacagttgatgcaaaacgcgaattcattaagaagttcgatagtattcgctatgactccgagaaaaatttgttttgcttcacttttgactacaataactttattactcagaatacagtcatgagtaaaagctcctggtcggtttacacgtacggggtacgcatcaaacgtcgttttgtgaatggtcgttttagtaatgagtcggatacaattgatattaccaaggatatggagaagactctggaaatgacagacatcaattggcgtgatggacatgatttgcgtcaggacattatcgactatgagattgtgcagcatattttcgaaatttttcgcctgacggtgcaaatgcgtaattccttaagcgaactggaagatcgcgactatgaccgcttaatttctcctgtgctgaatgagaacaacatcttctatgactcagcgaaagccggggacgctttgccaaaggatgcagatgctaacggtgcatattgtattgctctgaaaggcctttacgagatcaaacaaattactgaaaactggaaggaagatggaaagttttcccgtgataaattgaagatctctaataaggactggtttgactttatccaaaataaacgttattta

SEQ ID NO: 32 - protein, 1263 aa, synthetic construct
MNNGTNNFQNFIGISSLQKTLRNALIPTETTQQFIVKNGIIKEDELRGENRQILKDIMDDYYRGFISETLSSIDDIDWTSLFEKMEIQLKNGDNKDTLIKEQTEYRKAIHKKFANDDRFKNMFSAKLISDILPEFVIHNNNYSASEKEEKTQVIKLFSRFATSFKDYFKNRANCFSADDISSSSCHRIVNDNAEIFFSNALVYRRIVKSLSNDDINKISGDMKDSLKEMSLEEIYSYEKYGEFITQEGISFYNDICGKVNSFMNLYCQKNKENKNLYKLQKLHKQILCIADTSYERPYKFESDEEVYQSVNGFLDNISSKHIVERLRKIGDNYNGYNLDKIYIVSKFYESVSQKTYRDWETINTALEIHYNNILPGNGKSKADKVKKAVKNDLQKSITEINELVSNYKLCSDDNIKAETYIHEISHILNNFEAQELKYNPEIHLVESELKASELKNVLDVIMNAFHWCSVFMTEELVDKDNNFYAELEEIYDEIYPVISLYNLVRNYVTQKPYSTKKIKLNFGIPTLADGWSKSKEYSNNAIILMRDNLYYLGIFNAKNKPDKKIIEGNTSENKGDYKKMIYNLLPGPNKMIPKVFLSSKTGVETYKPSAYILEGYKQNKHIKSSKDFDITFCHDLIDYFKNCIAIHPEWKNFGFDFSDTSTYEDISGFYREVELQGYKIDWTYISEKDIDLLQEKGQLYLFQIYNKDFSKKSTGNDNLHTMYLKNLFSEENLKDIVLKLNGEAEIFFRKSSIKNPIIHKKGSILVNRTYEAEEKDQFGNIQIVRKNIPENIYQELYKYFNDKSDKELSDEAAKLKNVVGHHEAATNIVKDYRYTYDKYFLHMPITINFKANKTGFINDRILQYIAKEKDLHVIGIDRGERNLIYVSVIDTCGNIVEQKSFNIVNGYDYQIKLKQQEGARQIARKEWKEIGKIKEIKEGYLSLVIHEISKMVIKYNAIIAMEDLSYGFKKGRFKVERQVYQKFETMLINKLNYLVFKDISITENGGLLKGYQLTYIPDKLKNVGHQCGCIFYVPAAYTSKIDPTTGFVNIFKFKDLTVDAKREFIKKFDSIRYDSEKNLFCFTFDYNNFITQNTVMSKSSWSVYTYGVRIKRRFVNGRFSNESDTIDITKDMEKTLEMTDINWRDGHDLRQDIIDYEIVQHIFEIFRLTVQMRNSLSELEDRDYDRLISPVLNENNIFYDSAKAGDALPKDADANGAYCIALKGLYEIKQITENWKEDGKFSRDKLKISNKDWFDFIQNKRYL

SEQ ID NO: 33 - DNA, 3789 bp, synthetic construct
  source 1..3789: mol_type = other DNA
atgaataacggtaccaataactttcaaaattttatcgggatctcctcgttgcaaaaaactcttcgtaatgctttaatcccgactgagacaacacagcagttcatcgttaaaaacggcatcattaaagaagatgagctgcgcggcgagaaccgtcagattttaaaggacatcatggacgactattaccgtgggttcatctcagaaacattaagcagcatcgatgatatcgactggacctcactgtttgagaagatggagattcaacttaagaatggagacaacaaagacactttaattaaggagcagacggaatatcgtaaagctatccataaaaaatttgcaaacgatgaccgtttcaaaaatatgttttccgcaaaattgattagcgacattttacctgaattcgtaatccataacaacaactattccgcatctgaaaaagaggagaagacccaagttatcaaacttttttcacgtttcgcgacatcttttaaagactactttaagaatcgtgcgaattgtttcagtgcagatgatatttcgtctagttcatgtcaccgtatcgtgaatgacaacgctgagattttcttttctaatgcgttggtgtatcgccgcatcgtaaagtccttgtcgaatgatgatatcaacaaaattagtggtgacatgaaagactccctgaaagaaatgtcattagaggagatttacagctacgaaaaatacggagagttcatcactcaggaaggtatctccttttacaacgatatttgcggcaaagttaatagtttcatgaatctgtattgtcagaagaataaggaaaacaagaatctgtacaagttacaaaagcttcataaacagatcttgtgcatcgccgacacgtcttatgaagtcgtgtataaatttgaaagcgacgaagaagtatatcagagtgtgaatggattcttggacaatatctcatcaaaacacattgttgaacgtttgcgcaaaatcggcgacaactataacggatacaacttggataaaatttatatcgtatcaaaattttatgaatcagtatcccaaaagacttaccgtgattgggagactattaatacggcgttagaaatccattacaacaacattctgccgggtaacggtaaatcgaaagcggacaaagtgaagaaggcggttaagaacgatcttcagaagtctatcacggagattaatgagctggtttccaattacaagttgtgctcggatgataacatcaaagctgaaacctatatccatgaaatttctcatattcttaataacttcgaggcacaagaattaaaatataacccagaaattcatctggttgagagcgaacttaaagcttcagaattaaaaaatgttttggacgtaattatgaacgccttccattggtgcagcgtgtttatgacagaggagttagtagataaggataacaacttttatgcagaattggaagagatctatgatgagatctatccagtgatttcactgtataacttagtccgtaattacgtcactcagaagccgtactcaactaaaaagatcaagttaaattttggaattccgacattggcggatggttggagtaagtctaaggaatactcaaataacgctattatcttaatgcgtgacaacctgtattacttgggtattttcaatgccaaaaataagcccgataaaaaaatcattgaagggaatacttcagaaaataagggagattacaaaaaaatgatttataaccttttgccaggcccaaacaaaatgatccccaaggtgtttttgagtagtaagacgggagtagaaacatataagccatcagcgtacattcttgaagggtacaaacaaaataaacacatcaagagcagcaaggactttgacattacattttgtcatgacttaatcgactactttaaaaattgcattgccattcaccctgagtggaaaaattttggtttcgacttcagtgatacctctacctatgaagatatctctggtttttatcgtgaggtagaacttcagggttacaagatcgattggacgtacatttccgagaaagacattgatcttttacaagagaagggtcagctttacttatttcagatctacaataaagacttttcgaaaaaatccacgggcaacgacaaccttcatacaatgtacttaaagaacctgttctctgaagaaaacttgaaagatatcgtgcttaaattgaatggcgaggccgagatttttttccgtaaaagctcgattaagaatcccatcatccacaagaaaggcagcattctggtaaatcgtacctatgaagcggaggaaaaggaccaatttggtaatattcagattgtccgtaagaacatccctgaaaatatctatcaagaattatataaatatttcaacgataagtcggacaaggaacttagcgatgaagccgcgaagttgaaaaatgttgttggtcaccacgaagcagcaacaaacattgtgaaagactatcgctacacttacgataagtactttttacatatgcctattacgattaactttaaggcaaataagacaggttttatcaacgaccgtatcctgcaatatattgcaaaagagaaggacctgcatgtcattgggattgatcgcggtgaacgcaatctgatttacgtgagtgttattgatacctgcggtaatattgttgagcaaaagtcttttaatatcgttaatggttacgactaccaaattaagcttaaacaacaggaaggtgcccgccagatcgcccgtaaggagtggaaggaaatcggaaaaattaaggaaatcaaagagggatatctgagcttggttattcatgaaatctcaaagatggttattaagtacaacgccatcatcgctatggaagacttatcgtatgggtttaaaaagggtcgtttcaaagttgagcgccaggtctaccaaaagtttgaaacgatgcttattaataaattaaactacttggttttcaaagatatctctattaccgagaatggaggtttactgaaaggataccagttaacgtatatccccgataagcttaaaaacgtgggccatcagtgtggctgtattttctatgtgcccgcggcatatacatcaaaaattgacccgacgacgggtttcgttaatatcttcaagttcaaagatctgacagttgatgcaaaacgcgaattcattaagaagttcgatagtattcgctatgactccgagaaaaatttgttttgcttcacttttgactacaataactttattactcagaatacagtcatgagtaaaagctcctggtcggtttacacgtacggggtacgcatcaaacgtcgttttgtgaatggtcgttttagtaatgagtcggatacaattgatattaccaaggatatggagaagactctggaaatgacagacatcaattggcgtgatggacatgatttgcgtcaggacattatcgactatgagattgtgcagcatattttcgaaatttttcgcctgacggtgcaaatgcgtaattccttaagcgaactggaagatcgcgactatgaccgcttaatttctcctgtgctgaatgagaacaacatcttctatgactcagcgaaagccggggacgctttgccaaaggatgcagatgctaacggtgcatattgtattgctctgaaaggcctttacgagatcaaacaaattactgaaaactggaaggaagatggaaagttttcccgtgataaattgaagatctctaataaggactggtttgactttatccaaaataaacgttattta

SEQ ID NO: 34 - protein, 1263 aa, synthetic construct
MNNGTNNFQNFIGISSLQKTLRNALIPTETTQQFIVKNGIIKEDELRGENRQILKDIMDDYYRGFISETLSSIDDIDWTSLFEKMEIQLKNGDNKDTLIKEQTEYRKAIHKKFANDDRFKNMFSAKLISDILPEFVIHNNNYSASEKEEKTQVIKLFSRFATSFKDYFKNRANCFSADDISSSSCHRIVNDNAEIFFSNALVYRRIVKSLSNDDINKISGDMKDSLKEMSLEEIYSYEKYGEFITQEGISFYNDICGKVNSFMNLYCQKNKENKNLYKLQKLHKQILCIADTSYEVVYKFESDEEVYQSVNGFLDNISSKHIVERLRKIGDNYNGYNLDKIYIVSKFYESVSQKTYRDWETINTALEIHYNNILPGNGKSKADKVKKAVKNDLQKSITEINELVSNYKLCSDDNIKAETYIHEISHILNNFEAQELKYNPEIHLVESELKASELKNVLDVIMNAFHWCSVFMTEELVDKDNNFYAELEEIYDEIYPVISLYNLVRNYVTQKPYSTKKIKLNFGIPTLADGWSKSKEYSNNAIILMRDNLYYLGIFNAKNKPDKKIIEGNTSENKGDYKKMIYNLLPGPNKMIPKVFLSSKTGVETYKPSAYILEGYKQNKHIKSSKDFDITFCHDLIDYFKNCIAIHPEWKNFGFDFSDTSTYEDISGFYREVELQGYKIDWTYISEKDIDLLQEKGQLYLFQIYNKDFSKKSTGNDNLHTMYLKNLFSEENLKDIVLKLNGEAEIFFRKSSIKNPIIHKKGSILVNRTYEAEEKDQFGNIQIVRKNIPENIYQELYKYFNDKSDKELSDEAAKLKNVVGHHEAATNIVKDYRYTYDKYFLHMPITINFKANKTGFINDRILQYIAKEKDLHVIGIDRGERNLIYVSVIDTCGNIVEQKSFNIVNGYDYQIKLKQQEGARQIARKEWKEIGKIKEIKEGYLSLVIHEISKMVIKYNAIIAMEDLSYGFKKGRFKVERQVYQKFETMLINKLNYLVFKDISITENGGLLKGYQLTYIPDKLKNVGHQCGCIFYVPAAYTSKIDPTTGFVNIFKFKDLTVDAKREFIKKFDSIRYDSEKNLFCFTFDYNNFITQNTVMSKSSWSVYTYGVRIKRRFVNGRFSNESDTIDITKDMEKTLEMTDINWRDGHDLRQDIIDYEIVQHIFEIFRLTVQMRNSLSELEDRDYDRLISPVLNENNIFYDSAKAGDALPKDADANGAYCIALKGLYEIKQITENWKEDGKFSRDKLKISNKDWFDFIQNKRYL

SEQ ID NO: 35 - DNA, 3789 bp, synthetic construct
  source 1..3789: mol_type = other DNA
atgaataacggtaccaataactttcaaaattttatcgggatctcctcgttgcaaaaaactcttcgtaatgctttaatcccgactgagacaacacagcagttcatcgttaaaaacggcatcattaaagaagatgagctgcgcggcgagaaccgtcagattttaaaggacatcatggacgactattaccgtgggttcatctcagaaacattaagcagcatcgatgatatcgactggacctcactgtttgagaagatggagattcaacttaagaatggagacaacaaagacactttaattaaggagcagacggaatatcgtaaagctatccataaaaaatttgcaaacgatgaccgtttcaaaaatatgttttccgcaaaattgattagcgacattttacctgaattcgtaatccataacaacaactattccgcatctgaaaaagaggagaagacccaagttatcaaacttttttcacgtttcgcgacatcttttaaagactactttaagaatcgtgcgaattgtttcagtgcagatgatatttcgtctagttcatgtcaccgtatcgtgaatgacaacgctgagattttcttttctaatgcgttggtgtatcgccgcatcgtaaagtccttgtcgaatgatgatatcaacaaaattagtggtgacatgaaagactccctgaaagaaatgtcattagaggagatttacagctacgaaaaatacggagagttcatcactcaggaaggtatctccttttacaacgatatttgcggcaaagttaatagtttcatgaatctgtattgtcagaagaataaggaaaacaagaatctgtacaagttacaaaagcttcataaacagatcttgtgcatcgccgacacgtcttatgaagtccgttataaatttgaaagcgacgaagaagtatatcagagtgtgaatggattcttggacaatatctcatcaaaacacattgttgaacgtttgcgcaaaatcggcgacaactataacggatacaacttggataaaatttatatcgtatcaaaattttatgaatcagtatcccaaaagacttaccgtgattgggagactattaatacggcgttagaaatccattacaacaacattctgccgggtaacggtaaatcgaaagcggacaaagtgaagaaggcggttaagaacgatcttcagaagtctatcacggagattaatgagctggtttccaattacaagttgtgctcggatgataacatcaaagctgaaacctatatccatgaaatttctcatattcttaataacttcgaggcacaagaattaaaatataacccagaaattcatctggttgagagcgaacttaaagcttcagaattaaaaaatgttttggacgtaattatgaacgccttccattggtgcagcgtgtttatgacagaggagttagtagataaggataacaacttttatgcagaattggaagagatctatgatgagatctatccagtgatttcactgtataacttagtccgtaattacgtcactcagaagccgtactcaactaaaaagatcaagttaaattttggaattccgacattggcggatggttggagtaagtctaaggaatactcaaataacgctattatcttaatgcgtgacaacctgtattacttgggtattttcaatgccaaaaataagcccgataaaaaaatcattgaagggaatacttcagaaaataagggagattacaaaaaaatgatttataaccttttgccaggcccaaacaaaatgatccccaaggtgtttttgagtagtaagacgggagtagaaacatataagccatcagcgtacattcttgaagggtacaaacaaaataaacacatcaagagcagcaaggactttgacattacattttgtcatgacttaatcgactactttaaaaattgcattgccattcaccctgagtggaaaaattttggtttcgacttcagtgatacctctacctatgaagatatctctggtttttatcgtgaggtagaacttcagggttacaagatcgattggacgtacatttccgagaaagacattgatcttttacaagagaagggtcagctttacttatttcagatctacaataaagacttttcgaaaaaatccacgggcaacgacaaccttcatacaatgtacttaaagaacctgttctctgaagaaaacttgaaagatatcgtgcttaaattgaatggcgaggccgagatttttttccgtaaaagctcgattaagaatcccatcatccacaagaaaggcagcattctggtaaatcgtacctatgaagcggaggaaaaggaccaatttggtaatattcagattgtccgtaagaacatccctgaaaatatctatcaagaattatataaatatttcaacgataagtcggacaaggaacttagcgatgaagccgcgaagttgaaaaatgttgttggtcaccacgaagcagcaacaaacattgtgaaagactatcgctacacttacgataagtactttttacatatgcctattacgattaactttaaggcaaataagacaggttttatcaacgaccgtatcctgcaatatattgcaaaagagaaggacctgcatgtcattgggattgatcgcggtgaacgcaatctgatttacgtgagtgttattgatacctgcggtaatattgttgagcaaaagtcttttaatatcgttaatggttacgactaccaaattaagcttaaacaacaggaaggtgcccgccagatcgcccgtaaggagtggaaggaaatcggaaaaattaaggaaatcaaagagggatatctgagcttggttattcatgaaatctcaaagatggttattaagtacaacgccatcatcgctatggaagacttatcgtatgggtttaaaaagggtcgtttcaaagttgagcgccaggtctaccaaaagtttgaaacgatgcttattaataaattaaactacttggttttcaaagatatctctattaccgagaatggaggtttactgaaaggataccagttaacgtatatccccgataagcttaaaaacgtgggccatcagtgtggctgtattttctatgtgcccgcggcatatacatcaaaaattgacccgacgacgggtttcgttaatatcttcaagttcaaagatctgacagttgatgcaaaacgcgaattcattaagaagttcgatagtattcgctatgactccgagaaaaatttgttttgcttcacttttgactacaataactttattactcagaatacagtcatgagtaaaagctcctggtcggtttacacgtacggggtacgcatcaaacgtcgttttgtgaatggtcgttttagtaatgagtcggatacaattgatattaccaaggatatggagaagactctggaaatgacagacatcaattggcgtgatggacatgatttgcgtcaggacattatcgactatgagattgtgcagcatattttcgaaatttttcgcctgacggtgcaaatgcgtaattccttaagcgaactggaagatcgcgactatgaccgcttaatttctcctgtgctgaatgagaacaacatcttctatgactcagcgaaagccggggacgctttgccaaaggatgcagatgctaacggtgcatattgtattgctctgaaaggcctttacgagatcaaacaaattactgaaaactggaaggaagatggaaagttttcccgtgataaattgaagatctctaataaggactggtttgactttatccaaaataaacgttattta

SEQ ID NO: 36 - protein, 1263 aa, synthetic construct
MNNGTNNFQNFIGISSLQKTLRNALIPTETTQQFIVKNGIIKEDELRGENRQILKDIMDDYYRGFISETLSSIDDIDWTSLFEKMEIQLKNGDNKDTLIKEQTEYRKAIHKKFANDDRFKNMFSAKLISDILPEFVIHNNNYSASEKEEKTQVIKLFSRFATSFKDYFKNRANCFSADDISSSSCHRIVNDNAEIFFSNALVYRRIVKSLSNDDINKISGDMKDSLKEMSLEEIYSYEKYGEFITQEGISFYNDICGKVNSFMNLYCQKNKENKNLYKLQKLHKQILCIADTSYEVRYKFESDEEVYQSVNGFLDNISSKHIVERLRKIGDNYNGYNLDKIYIVSKFYESVSQKTYRDWETINTALEIHYNNILPGNGKSKADKVKKAVKNDLQKSITEINELVSNYKLCSDDNIKAETYIHEISHILNNFEAQELKYNPEIHLVESELKASELKNVLDVIMNAFHWCSVFMTEELVDKDNNFYAELEEIYDEIYPVISLYNLVRNYVTQKPYSTKKIKLNFGIPTLADGWSKSKEYSNNAIILMRDNLYYLGIFNAKNKPDKKIIEGNTSENKGDYKKMIYNLLPGPNKMIPKVFLSSKTGVETYKPSAYILEGYKQNKHIKSSKDFDITFCHDLIDYFKNCIAIHPEWKNFGFDFSDTSTYEDISGFYREVELQGYKIDWTYISEKDIDLLQEKGQLYLFQIYNKDFSKKSTGNDNLHTMYLKNLFSEENLKDIVLKLNGEAEIFFRKSSIKNPIIHKKGSILVNRTYEAEEKDQFGNIQIVRKNIPENIYQELYKYFNDKSDKELSDEAAKLKNVVGHHEAATNIVKDYRYTYDKYFLHMPITINFKANKTGFINDRILQYIAKEKDLHVIGIDRGERNLIYVSVIDTCGNIVEQKSFNIVNGYDYQIKLKQQEGARQIARKEWKEIGKIKEIKEGYLSLVIHEISKMVIKYNAIIAMEDLSYGFKKGRFKVERQVYQKFETMLINKLNYLVFKDISITENGGLLKGYQLTYIPDKLKNVGHQCGCIFYVPAAYTSKIDPTTGFVNIFKFKDLTVDAKREFIKKFDSIRYDSEKNLFCFTFDYNNFITQNTVMSKSSWSVYTYGVRIKRRFVNGRFSNESDTIDITKDMEKTLEMTDINWRDGHDLRQDIIDYEIVQHIFEIFRLTVQMRNSLSELEDRDYDRLISPVLNENNIFYDSAKAGDALPKDADANGAYCIALKGLYEIKQITENWKEDGKFSRDKLKISNKDWFDFIQNKRYL

SEQ ID NO: 37 - DNA, 3789 bp, synthetic construct
  source 1..3789: mol_type = other DNA
atgaataacggtaccaataactttcaaaattttatcgggatctcctcgttgcaaaaaactcttcgtaatgctttaatcccgactgagacaacacagcagttcatcgttaaaaacggcatcattaaagaagatgagctgcgcggcgagaaccgtcagattttaaaggacatcatggacgactattaccgtgggttcatctcagaaacattaagcagcatcgatgatatcgactggacctcactgtttgagaagatggagattcaacttaagaatggagacaacaaagacactttaattaaggagcagacggaatatcgtaaagctatccataaaaaatttgcaaacgatgaccgtttcaaaaatatgttttccgcaaaattgattagcgacattttacctgaattcgtaatccataacaacaactattccgcatctgaaaaagaggagaagacccaagttatcaaacttttttcacgtttcgcgacatcttttaaagactactttaagaatcgtgcgaattgtttcagtgcagatgatatttcgtctagttcatgtcaccgtatcgtgaatgacaacgctgagattttcttttctaatgcgttggtgtatcgccgcatcgtaaagtccttgtcgaatgatgatatcaacaaaattagtggtgacatgaaagactccctgaaagaaatgtcattagaggagatttacagctacgaaaaatacggagagttcatcactcaggaaggtatctccttttacaacgatatttgcggcaaagttaatagtttcatgaatctgtattgtcagaagaataaggaaaacaagaatctgtacaagttacaaaagcttcataaacagatcttgtgcatcgccgacacgtcttatgaagtcttttataaatttgaaagcgacgaagaagtatatcagagtgtgaatggattcttggacaatatctcatcaaaacacattgttgaacgtttgcgcaaaatcggcgacaactataacggatacaacttggataaaatttatatcgtatcaaaattttatgaatcagtatcccaaaagacttaccgtgattgggagactattaatacggcgttagaaatccattacaacaacattctgccgggtaacggtaaatcgaaagcggacaaagtgaagaaggcggttaagaacgatcttcagaagtctatcacggagattaatgagctggtttccaattacaagttgtgctcggatgataacatcaaagctgaaacctatatccatgaaatttctcatattcttaataacttcgaggcacaagaattaaaatataacccagaaattcatctggttgagagcgaacttaaagcttcagaattaaaaaatgttttggacgtaattatgaacgccttccattggtgcagcgtgtttatgacagaggagttagtagataaggataacaacttttatgcagaattggaagagatctatgatgagatctatccagtgatttcactgtataacttagtccgtaattacgtcactcagaagccgtactcaactaaaaagatcaagttaaattttggaattccgacattggcggatggttggagtaagtctaaggaatactcaaataacgctattatcttaatgcgtgacaacctgtattacttgggtattttcaatgccaaaaataagcccgataaaaaaatcattgaagggaatacttcagaaaataagggagattacaaaaaaatgatttataaccttttgccaggcccaaacaaaatgatccccaaggtgtttttgagtagtaagacgggagtagaaacatataagccatcagcgtacattcttgaagggtacaaacaaaataaacacatcaagagcagcaaggactttgacattacattttgtcatgacttaatcgactactttaaaaattgcattgccattcaccctgagtggaaaaattttggtttcgacttcagtgatacctctacctatgaagatatctctggtttttatcgtgaggtagaacttcagggttacaagatcgattggacgtacatttccgagaaagacattgatcttttacaagagaagggtcagctttacttatttcagatctacaataaagacttttcgaaaaaatccacgggcaacgacaaccttcatacaatgtacttaaagaacctgttctctgaagaaaacttgaaagatatcgtgcttaaattgaatggcgaggccgagatttttttccgtaaaagctcgattaagaatcccatcatccacaagaaaggcagcattctggtaaatcgtacctatgaagcggaggaaaaggaccaatttggtaatattcagattgtccgtaagaacatccctgaaaatatctatcaagaattatataaatatttcaacgataagtcggacaaggaacttagcgatgaagccgcgaagttgaaaaatgttgttggtcaccacgaagcagcaacaaacattgtgaaagactatcgctacacttacgataagtactttttacatatgcctattacgattaactttaaggcaaataagacaggttttatcaacgaccgtatcctgcaatatattgcaaaagagaaggacctgcatgtcattgggattgatcgcggtgaacgcaatctgatttacgtgagtgttattgatacctgcggtaatattgttgagcaaaagtcttttaatatcgttaatggttacgactaccaaattaagcttaaacaacaggaaggtgcccgccagatcgcccgtaaggagtggaaggaaatcggaaaaattaaggaaatcaaagagggatatctgagcttggttattcatgaaatctcaaagatggttattaagtacaacgccatcatcgctatggaagacttatcgtatgggtttaaaaagggtcgtttcaaagttgagcgccaggtctaccaaaagtttgaaacgatgcttattaataaattaaactacttggttttcaaagatatctctattaccgagaatggaggtttactgaaaggataccagttaacgtatatccccgataagcttaaaaacgtgggccatcagtgtggctgtattttctatgtgcccgcggcatatacatcaaaaattgacccgacgacgggtttcgttaatatcttcaagttcaaagatctgacagttgatgcaaaacgcgaattcattaagaagttcgatagtattcgctatgactccgagaaaaatttgttttgcttcacttttgactacaataactttattactcagaatacagtcatgagtaaaagctcctggtcggtttacacgtacggggtacgcatcaaacgtcgttttgtgaatggtcgttttagtaatgagtcggatacaattgatattaccaaggatatggagaagactctggaaatgacagacatcaattggcgtgatggacatgatttgcgtcaggacattatcgactatgagattgtgcagcatattttcgaaatttttcgcctgacggtgcaaatgcgtaattccttaagcgaactggaagatcgcgactatgaccgcttaatttctcctgtgctgaatgagaacaacatcttctatgactcagcgaaagccggggacgctttgccaaaggatgcagatgctaacggtgcatattgtattgctctgaaaggcctttacgagatcaaacaaattactgaaaactggaaggaagatggaaagttttcccgtgataaattgaagatctctaataaggactggtttgactttatccaaaataaacgttattta

SEQ ID NO: 38 - protein, 1263 aa, synthetic construct
MNNGTNNFQNFIGISSLQKTLRNALIPTETTQQFIVKNGIIKEDELRGENRQILKDIMDDYYRGFISETLSSIDDIDWTSLFEKMEIQLKNGDNKDTLIKEQTEYRKAIHKKFANDDRFKNMFSAKLISDILPEFVIHNNNYSASEKEEKTQVIKLFSRFATSFKDYFKNRANCFSADDISSSSCHRIVNDNAEIFFSNALVYRRIVKSLSNDDINKISGDMKDSLKEMSLEEIYSYEKYGEFITQEGISFYNDICGKVNSFMNLYCQKNKENKNLYKLQKLHKQILCIADTSYEVFYKFESDEEVYQSVNGFLDNISSKHIVERLRKIGDNYNGYNLDKIYIVSKFYESVSQKTYRDWETINTALEIHYNNILPGNGKSKADKVKKAVKNDLQKSITEINELVSNYKLCSDDNIKAETYIHEISHILNNFEAQELKYNPEIHLVESELKASELKNVLDVIMNAFHWCSVFMTEELVDKDNNFYAELEEIYDEIYPVISLYNLVRNYVTQKPYSTKKIKLNFGIPTLADGWSKSKEYSNNAIILMRDNLYYLGIFNAKNKPDKKIIEGNTSENKGDYKKMIYNLLPGPNKMIPKVFLSSKTGVETYKPSAYILEGYKQNKHIKSSKDFDITFCHDLIDYFKNCIAIHPEWKNFGFDFSDTSTYEDISGFYREVELQGYKIDWTYISEKDIDLLQEKGQLYLFQIYNKDFSKKSTGNDNLHTMYLKNLFSEENLKDIVLKLNGEAEIFFRKSSIKNPIIHKKGSILVNRTYEAEEKDQFGNIQIVRKNIPENIYQELYKYFNDKSDKELSDEAAKLKNVVGHHEAATNIVKDYRYTYDKYFLHMPITINFKANKTGFINDRILQYIAKEKDLHVIGIDRGERNLIYVSVIDTCGNIVEQKSFNIVNGYDYQIKLKQQEGARQIARKEWKEIGKIKEIKEGYLSLVIHEISKMVIKYNAIIAMEDLSYGFKKGRFKVERQVYQKFETMLINKLNYLVFKDISITENGGLLKGYQLTYIPDKLKNVGHQCGCIFYVPAAYTSKIDPTTGFVNIFKFKDLTVDAKREFIKKFDSIRYDSEKNLFCFTFDYNNFITQNTVMSKSSWSVYTYGVRIKRRFVNGRFSNESDTIDITKDMEKTLEMTDINWRDGHDLRQDIIDYEIVQHIFEIFRLTVQMRNSLSELEDRDYDRLISPVLNENNIFYDSAKAGDALPKDADANGAYCIALKGLYEIKQITENWKEDGKFSRDKLKISNKDWFDFIQNKRYL

SEQ ID NO: 39 - DNA, 3789 bp, synthetic construct
  source 1..3789: mol_type = other DNA
atgaataacggtaccaataactttcaaaattttatcgggatctcctcgttgcaaaaaactcttcgtaatgctttaatcccgactgagacaacacagcagttcatcgttaaaaacggcatcattaaagaagatgagctgcgcggcgagaaccgtcagattttaaaggacatcatggacgactattaccgtgggttcatctcagaaacattaagcagcatcgatgatatcgactggacctcactgtttgagaagatggagattcaacttaagaatggagacaacaaagacactttaattaaggagcagacggaatatcgtaaagctatccataaaaaatttgcaaacgatgaccgtttcaaaaatatgttttccgcaaaattgattagcgacattttacctgaattcgtaatccataacaacaactattccgcatctgaaaaagaggagaagacccaagttatcaaacttttttcacgtttcgcgacatcttttaaagactactttaagaatcgtgcgaattgtttcagtgcagatgatatttcgtctagttcatgtcaccgtatcgtgaatgacaacgctgagattttcttttctaatgcgttggtgtatcgccgcatcgtaaagtccttgtcgaatgatgatatcaacaaaattagtggtgacatgaaagactccctgaaagaaatgtcattagaggagatttacagctacgaaaaatacggagagttcatcactcaggaaggtatctccttttacaacgatatttgcggcaaagttaatagtttcatgaatctgtattgtcagaagaataaggaaaacaagaatctgtacaagttacaaaagcttcataaacagatcttgtgcatcgccgacacgtcttatgaagtcccgtataaatttgaaagccgtgaagaagtatatcagagtgtgaatggattcttggacaatatctcatcaaaacacattgttgaacgtttgcgcaaaatcggcgacaactataacggatacaacttggataaaatttatatcgtatcaaaattttatgaatcagtatcccaaaagacttaccgtgattgggagactattaatacggcgttagaaatccattacaacaacattctgccgggtaacggtaaatcgaaagcggacaaagtgaagaaggcggttaagaacgatcttcagaagtctatcacggagattaatgagctggtttccaattacaagttgtgctcggatgataacatcaaagctgaaacctatatccatgaaatttctcatattcttaataacttcgaggcacaagaattaaaatataacccagaaattcatctggttgagagcgaacttaaagcttcagaattaaaaaatgttttggacgtaattatgaacgccttccattggtgcagcgtgtttatgacagaggagttagtagataaggataacaacttttatgcagaattggaagagatctatgatgagatctatccagtgatttcactgtataacttagtccgtaattacgtcactcagaagccgtactcaactaaaaagatcaagttaaattttggaattccgacattggcggatggttggagtaagtctaaggaatactcaaataacgctattatcttaatgcgtgacaacctgtattacttgggtattttcaatgccaaaaataagcccgataaaaaaatcattgaagggaatacttcagaaaataagggagattacaaaaaaatgatttataaccttttgccaggcccaaacaaaatgatccccaaggtgtttttgagtagtaagacgggagtagaaacatataagccatcagcgtacattcttgaagggtacaaacaaaataaacacatcaagagcagcaaggactttgacattacattttgtcatgacttaatcgactactttaaaaattgcattgccattcaccctgagtggaaaaattttggtttcgacttcagtgatacctctacctatgaagatatctctggtttttatcgtgaggtagaacttcagggttacaagatcgattggacgtacatttccgagaaagacattgatcttttacaagagaagggtcagctttacttatttcagatctacaataaagacttttcgaaaaaatccacgggcaacgacaaccttcatacaatgtacttaaagaacctgttctctgaagaaaacttgaaagatatcgtgcttaaattgaatggcgaggccgagatttttttccgtaaaagctcgattaagaatcccatcatccacaagaaaggcagcattctggtaaatcgtacctatgaagcggaggaaaaggaccaatttggtaatattcagattgtccgtaagaacatccctgaaaatatctatcaagaattatataaatatttcaacgataagtcggacaaggaacttagcgatgaagccgcgaagttgaaaaatgttgttggtcaccacgaagcagcaacaaacattgtgaaagactatcgctacacttacgataagtactttttacatatgcctattacgattaactttaaggcaaataagacaggttttatcaacgaccgtatcctgcaatatattgcaaaagagaaggacctgcatgtcattgggattgatcgcggtgaacgcaatctgatttacgtgagtgttattgatacctgcggtaatattgttgagcaaaagtcttttaatatcgttaatggttacgactaccaaattaagcttaaacaacaggaaggtgcccgccagatcgcccgtaaggagtggaaggaaatcggaaaaattaaggaaatcaaagagggatatctgagcttggttattcatgaaatctcaaagatggttattaagtacaacgccatcatcgctatggaagacttatcgtatgggtttaaaaagggtcgtttcaaagttgagcgccaggtctaccaaaagtttgaaacgatgcttattaataaattaaactacttggttttcaaagatatctctattaccgagaatggaggtttactgaaaggataccagttaacgtatatccccgataagcttaaaaacgtgggccatcagtgtggctgtattttctatgtgcccgcggcatatacatcaaaaattgacccgacgacgggtttcgttaatatcttcaagttcaaagatctgacagttgatgcaaaacgcgaattcattaagaagttcgatagtattcgctatgactccgagaaaaatttgttttgcttcacttttgactacaataactttattactcagaatacagtcatgagtaaaagctcctggtcggtttacacgtacggggtacgcatcaaacgtcgttttgtgaatggtcgttttagtaatgagtcggatacaattgatattaccaaggatatggagaagactctggaaatgacagacatcaattggcgtgatggacatgatttgcgtcaggacattatcgactatgagattgtgcagcatattttcgaaatttttcgcctgacggtgcaaatgcgtaattccttaagcgaactggaagatcgcgactatgaccgcttaatttctcctgtgctgaatgagaacaacatcttctatgactcagcgaaagccggggacgctttgccaaaggatgcagatgctaacggtgcatattgtattgctctgaaaggcctttacgagatcaaacaaattactgaaaactggaaggaagatggaaagttttcccgtgataaattgaagatctctaataaggactggtttgactttatccaaaataaacgttattta

SEQ ID NO: 40 - protein, 1263 aa, synthetic construct
MNNGTNNFQNFIGISSLQKTLRNALIPTETTQQFIVKNGIIKEDELRGENRQILKDIMDDYYRGFISETLSSIDDIDWTSLFEKMEIQLKNGDNKDTLIKEQTEYRKAIHKKFANDDRFKNMFSAKLISDILPEFVIHNNNYSASEKEEKTQVIKLFSRFATSFKDYFKNRANCFSADDISSSSCHRIVNDNAEIFFSNALVYRRIVKSLSNDDINKISGDMKDSLKEMSLEEIYSYEKYGEFITQEGISFYNDICGKVNSFMNLYCQKNKENKNLYKLQKLHKQILCIADTSYEVPYKFESREEVYQSVNGFLDNISSKHIVERLRKIGDNYNGYNLDKIYIVSKFYESVSQKTYRDWETINTALEIHYNNILPGNGKSKADKVKKAVKNDLQKSITEINELVSNYKLCSDDNIKAETYIHEISHILNNFEAQELKYNPEIHLVESELKASELKNVLDVIMNAFHWCSVFMTEELVDKDNNFYAELEEIYDEIYPVISLYNLVRNYVTQKPYSTKKIKLNFGIPTLADGWSKSKEYSNNAIILMRDNLYYLGIFNAKNKPDKKIIEGNTSENKGDYKKMIYNLLPGPNKMIPKVFLSSKTGVETYKPSAYILEGYKQNKHIKSSKDFDITFCHDLIDYFKNCIAIHPEWKNFGFDFSDTSTYEDISGFYREVELQGYKIDWTYISEKDIDLLQEKGQLYLFQIYNKDFSKKSTGNDNLHTMYLKNLFSEENLKDIVLKLNGEAEIFFRKSSIKNPIIHKKGSILVNRTYEAEEKDQFGNIQIVRKNIPENIYQELYKYFNDKSDKELSDEAAKLKNVVGHHEAATNIVKDYRYTYDKYFLHMPITINFKANKTGFINDRILQYIAKEKDLHVIGIDRGERNLIYVSVIDTCGNIVEQKSFNIVNGYDYQIKLKQQEGARQIARKEWKEIGKIKEIKEGYLSLVIHEISKMVIKYNAIIAMEDLSYGFKKGRFKVERQVYQKFETMLINKLNYLVFKDISITENGGLLKGYQLTYIPDKLKNVGHQCGCIFYVPAAYTSKIDPTTGFVNIFKFKDLTVDAKREFIKKFDSIRYDSEKNLFCFTFDYNNFITQNTVMSKSSWSVYTYGVRIKRRFVNGRFSNESDTIDITKDMEKTLEMTDINWRDGHDLRQDIIDYEIVQHIFEIFRLTVQMRNSLSELEDRDYDRLISPVLNENNIFYDSAKAGDALPKDADANGAYCIALKGLYEIKQITENWKEDGKFSRDKLKISNKDWFDFIQNKRYL

SEQ ID NO: 41 - DNA, 3789 bp, synthetic construct
  source 1..3789: mol_type = other DNA
atgaataacggtaccaataactttcaaaattttatcgggatctcctcgttgcaaaaaactcttcgtaatgctttaatcccgactgagacaacacagcagttcatcgttaaaaacggcatcattaaagaagatgagctgcgcggcgagaaccgtcagattttaaaggacatcatggacgactattaccgtgggttcatctcagaaacattaagcagcatcgatgatatcgactggacctcactgtttgagaagatggagattcaacttaagaatggagacaacaaagacactttaattaaggagcagacggaatatcgtaaagctatccataaaaaatttgcaaacgatgaccgtttcaaaaatatgttttccgcaaaattgattagcgacattttacctgaattcgtaatccataacaacaactattccgcatctgaaaaagaggagaagacccaagttatcaaacttttttcacgtttcgcgacatcttttaaagactactttaagaatcgtgcgaattgtttcagtgcagatgatatttcgtctagttcatgtcaccgtatcgtgaatgacaacgctgagattttcttttctaatgcgttggtgtatcgccgcatcgtaaagtccttgtcgaatgatgatatcaacaaaattagtggtgacatgaaagactccctgaaagaaatgtcattagaggagatttacagctacgaaaaatacggagagttcatcactcaggaaggtatctccttttacaacgatatttgcggcaaagttaatagtttcatgaatctgtattgtcagaagaataaggaaaacaagaatctgtacaagttacaaaagcttcataaacagatcttgtgcatcgccgacacgtcttatgaagtcccgtataaatttgaaagctgcgaagaagtatatcagagtgtgaatggattcttggacaatatctcatcaaaacacattgttgaacgtttgcgcaaaatcggcgacaactataacggatacaacttggataaaatttatatcgtatcaaaattttatgaatcagtatcccaaaagacttaccgtgattgggagactattaatacggcgttagaaatccattacaacaacattctgccgggtaacggtaaatcgaaagcggacaaagtgaagaaggcggttaagaacgatcttcagaagtctatcacggagattaatgagctggtttccaattacaagttgtgctcggatgataacatcaaagctgaaacctatatccatgaaatttctcatattcttaataacttcgaggcacaagaattaaaatataacccagaaattcatctggttgagagcgaacttaaagcttcagaattaaaaaatgttttggacgtaattatgaacgccttccattggtgcagcgtgtttatgacagaggagttagtagataaggataacaacttttatgcagaattggaagagatctatgatgagatctatccagtgatttcactgtataacttagtccgtaattacgtcactcagaagccgtactcaactaaaaagatcaagttaaattttggaattccgacattggcggatggttggagtaagtctaaggaatactcaaataacgctattatcttaatgcgtgacaacctgtattacttgggtattttcaatgccaaaaataagcccgataaaaaaatcattgaagggaatacttcagaaaataagggagattacaaaaaaatgatttataaccttttgccaggcccaaacaaaatgatccccaaggtgtttttgagtagtaagacgggagtagaaacatataagccatcagcgtacattcttgaagggtacaaacaaaataaacacatcaagagcagcaaggactttgacattacattttgtcatgacttaatcgactactttaaaaattgcattgccattcaccctgagtggaaaaattttggtttcgacttcagtgatacctctacctatgaagatatctctggtttttatcgtgaggtagaacttcagggttacaagatcgattggacgtacatttccgagaaagacattgatcttttacaagagaagggtcagctttacttatttcagatctacaataaagacttttcgaaaaaatccacgggcaacgacaaccttcatacaatgtacttaaagaacctgttctctgaagaaaacttgaaagatatcgtgcttaaattgaatggcgaggccgagatttttttccgtaaaagctcgattaagaatcccatcatccacaagaaaggcagcattctggtaaatcgtacctatgaagcggaggaaaaggaccaatttggtaatattcagattgtccgtaagaacatccctgaaaatatctatcaagaattatataaatatttcaacgataagtcggacaaggaacttagcgatgaagccgcgaagttgaaaaatgttgttggtcaccacgaagcagcaacaaacattgtgaaagactatcgctacacttacgataagtactttttacatatgcctattacgattaactttaaggcaaataagacaggttttatcaacgaccgtatcctgcaatatattgcaaaagagaaggacctgcatgtcattgggattgatcgcggtgaacgcaatctgatttacgtgagtgttattgatacctgcggtaatattgttgagcaaaagtcttttaatatcgttaatggttacgactaccaaattaagcttaaacaacaggaaggtgcccgccagatcgcccgtaaggagtggaaggaaatcggaaaaattaaggaaatcaaagagggatatctgagcttggttattcatgaaatctcaaagatggttattaagtacaacgccatcatcgctatggaagacttatcgtatgggtttaaaaagggtcgtttcaaagttgagcgccaggtctaccaaaagtttgaaacgatgcttattaataaattaaactacttggttttcaaagatatctctattaccgagaatggaggtttactgaaaggataccagttaacgtatatccccgataagcttaaaaacgtgggccatcagtgtggctgtattttctatgtgcccgcggcatatacatcaaaaattgacccgacgacgggtttcgttaatatcttcaagttcaaagatctgacagttgatgcaaaacgcgaattcattaagaagttcgatagtattcgctatgactccgagaaaaatttgttttgcttcacttttgactacaataactttattactcagaatacagtcatgagtaaaagctcctggtcggtttacacgtacggggtacgcatcaaacgtcgttttgtgaatggtcgttttagtaatgagtcggatacaattgatattaccaaggatatggagaagactctggaaatgacagacatcaattggcgtgatggacatgatttgcgtcaggacattatcgactatgagattgtgcagcatattttcgaaatttttcgcctgacggtgcaaatgcgtaattccttaagcgaactggaagatcgcgactatgaccgcttaatttctcctgtgctgaatgagaacaacatcttctatgactcagcgaaagccggggacgctttgccaaaggatgcagatgctaacggtgcatattgtattgctctgaaaggcctttacgagatcaaacaaattactgaaaactggaaggaagatggaaagttttcccgtgataaattgaagatctctaataaggactggtttgactttatccaaaataaacgttattta

SEQ ID NO: 42 - protein, 1263 aa, synthetic construct
MNNGTNNFQNFIGISSLQKTLRNALIPTETTQQFIVKNGIIKEDELRGENRQILKDIMDDYYRGFISETLSSIDDIDWTSLFEKMEIQLKNGDNKDTLIKEQTEYRKAIHKKFANDDRFKNMFSAKLISDILPEFVIHNNNYSASEKEEKTQVIKLFSRFATSFKDYFKNRANCFSADDISSSSCHRIVNDNAEIFFSNALVYRRIVKSLSNDDINKISGDMKDSLKEMSLEEIYSYEKYGEFITQEGISFYNDICGKVNSFMNLYCQKNKENKNLYKLQKLHKQILCIADTSYEVPYKFESCEEVYQSVNGFLDNISSKHIVERLRKIGDNYNGYNLDKIYIVSKFYESVSQKTYRDWETINTALEIHYNNILPGNGKSKADKVKKAVKNDLQKSITEINELVSNYKLCSDDNIKAETYIHEISHILNNFEAQELKYNPEIHLVESELKASELKNVLDVIMNAFHWCSVFMTEELVDKDNNFYAELEEIYDEIYPVISLYNLVRNYVTQKPYSTKKIKLNFGIPTLADGWSKSKEYSNNAIILMRDNLYYLGIFNAKNKPDKKIIEGNTSENKGDYKKMIYNLLPGPNKMIPKVFLSSKTGVETYKPSAYILEGYKQNKHIKSSKDFDITFCHDLIDYFKNCIAIHPEWKNFGFDFSDTSTYEDISGFYREVELQGYKIDWTYISEKDIDLLQEKGQLYLFQIYNKDFSKKSTGNDNLHTMYLKNLFSEENLKDIVLKLNGEAEIFFRKSSIKNPIIHKKGSILVNRTYEAEEKDQFGNIQIVRKNIPENIYQELYKYFNDKSDKELSDEAAKLKNVVGHHEAATNIVKDYRYTYDKYFLHMPITINFKANKTGFINDRILQYIAKEKDLHVIGIDRGERNLIYVSVIDTCGNIVEQKSFNIVNGYDYQIKLKQQEGARQIARKEWKEIGKIKEIKEGYLSLVIHEISKMVIKYNAIIAMEDLSYGFKKGRFKVERQVYQKFETMLINKLNYLVFKDISITENGGLLKGYQLTYIPDKLKNVGHQCGCIFYVPAAYTSKIDPTTGFVNIFKFKDLTVDAKREFIKKFDSIRYDSEKNLFCFTFDYNNFITQNTVMSKSSWSVYTYGVRIKRRFVNGRFSNESDTIDITKDMEKTLEMTDINWRDGHDLRQDIIDYEIVQHIFEIFRLTVQMRNSLSELEDRDYDRLISPVLNENNIFYDSAKAGDALPKDADANGAYCIALKGLYEIKQITENWKEDGKFSRDKLKISNKDWFDFIQNKRYL

SEQ ID NO: 43 - DNA, 3789 bp, synthetic construct
  source 1..3789: mol_type = other DNA
atgaataacggtaccaataactttcaaaattttatcgggatctcctcgttgcaaaaaactcttcgtaatgctttaatcccgactgagacaacacagcagttcatcgttaaaaacggcatcattaaagaagatgagctgcgcggcgagaaccgtcagattttaaaggacatcatggacgactattaccgtgggttcatctcagaaacattaagcagcatcgatgatatcgactggacctcactgtttgagaagatggagattcaacttaagaatggagacaacaaagacactttaattaaggagcagacggaatatcgtaaagctatccataaaaaatttgcaaacgatgaccgtttcaaaaatatgttttccgcaaaattgattagcgacattttacctgaattcgtaatccataacaacaactattccgcatctgaaaaagaggagaagacccaagttatcaaacttttttcacgtttcgcgacatcttttaaagactactttaagaatcgtgcgaattgtttcagtgcagatgatatttcgtctagttcatgtcaccgtatcgtgaatgacaacgctgagattttcttttctaatgcgttggtgtatcgccgcatcgtaaagtccttgtcgaatgatgatatcaacaaaattagtggtgacatgaaagactccctgaaagaaatgtcattagaggagatttacagctacgaaaaatacggagagttcatcactcaggaaggtatctccttttacaacgatatttgcggcaaagttaatagtttcatgaatctgtattgtcagaagaataaggaaaacaagaatctgtacaagttacaaaagcttcataaacagatcttgtgcatcgccgacacgtcttatgaagtcccgtataaatttgaaagcgacgaaaaagtatatcagagtgtgaatggattcttggacaatatctcatcaaaacacattgttgaacgtttgcgcaaaatcggcgacaactataacggatacaacttggataaaatttatatcgtatcaaaattttatgaatcagtatcccaaaagacttaccgtgattgggagactattaatacggcgttagaaatccattacaacaacattctgccgggtaacggtaaatcgaaagcggacaaagtgaagaaggcggttaagaacgatcttcagaagtctatcacggagattaatgagctggtttccaattacaagttgtgctcggatgataacatcaaagctgaaacctatatccatgaaatttctcatattcttaataacttcgaggcacaagaattaaaatataacccagaaattcatctggttgagagcgaacttaaagcttcagaattaaaaaatgttttggacgtaattatgaacgccttccattggtgcagcgtgtttatgacagaggagttagtagataaggataacaacttttatgcagaattggaagagatctatgatgagatctatccagtgatttcactgtataacttagtccgtaattacgtcactcagaagccgtactcaactaaaaagatcaagttaaattttggaattccgacattggcggatggttggagtaagtctaaggaatactcaaataacgctattatcttaatgcgtgacaacctgtattacttgggtattttcaatgccaaaaataagcccgataaaaaaatcattgaagggaatacttcagaaaataagggagattacaaaaaaatgatttataaccttttgccaggcccaaacaaaatgatccccaaggtgtttttgagtagtaagacgggagtagaaacatataagccatcagcgtacattcttgaagggtacaaacaaaataaacacatcaagagcagcaaggactttgacattacattttgtcatgacttaatcgactactttaaaaattgcattgccattcaccctgagtggaaaaattttggtttcgacttcagtgatacctctacctatgaagatatctctggtttttatcgtgaggtagaacttcagggttacaagatcgattggacgtacatttccgagaaagacattgatcttttacaagagaagggtcagctttacttatttcagatctacaataaagacttttcgaaaaaatccacgggcaacgacaaccttcatacaatgtacttaaagaacctgttctctgaagaaaacttgaaagatatcgtgcttaaattgaatggcgaggccgagatttttttccgtaaaagctcgattaagaatcccatcatccacaagaaaggcagcattctggtaaatcgtacctatgaagcggaggaaaaggaccaatttggtaatattcagattgtccgtaagaacatccctgaaaatatctatcaagaattatataaatatttcaacgataagtcggacaaggaacttagcgatgaagccgcgaagttgaaaaatgttgttggtcaccacgaagcagcaacaaacattgtgaaagactatcgctacacttacgataagtactttttacatatgcctattacgattaactttaaggcaaataagacaggttttatcaacgaccgtatcctgcaatatattgcaaaagagaaggacctgcatgtcattgggattgatcgcggtgaacgcaatctgatttacgtgagtgttattgatacctgcggtaatattgttgagcaaaagtcttttaatatcgttaatggttacgactaccaaattaagcttaaacaacaggaaggtgcccgccagatcgcccgtaaggagtggaaggaaatcggaaaaattaaggaaatcaaagagggatatctgagcttggttattcatgaaatctcaaagatggttattaagtacaacgccatcatcgctatggaagacttatcgtatgggtttaaaaagggtcgtttcaaagttgagcgccaggtctaccaaaagtttgaaacgatgcttattaataaattaaactacttggttttcaaagatatctctattaccgagaatggaggtttactgaaaggataccagttaacgtatatccccgataagcttaaaaacgtgggccatcagtgtggctgtattttctatgtgcccgcggcatatacatcaaaaattgacccgacgacgggtttcgttaatatcttcaagttcaaagatctgacagttgatgcaaaacgcgaattcattaagaagttcgatagtattcgctatgactccgagaaaaatttgttttgcttcacttttgactacaataactttattactcagaatacagtcatgagtaaaagctcctggtcggtttacacgtacggggtacgcatcaaacgtcgttttgtgaatggtcgttttagtaatgagtcggatacaattgatattaccaaggatatggagaagactctggaaatgacagacatcaattggcgtgatggacatgatttgcgtcaggacattatcgactatgagattgtgcagcatattttcgaaatttttcgcctgacggtgcaaatgcgtaattccttaagcgaactggaagatcgcgactatgaccgcttaatttctcctgtgctgaatgagaacaacatcttctatgactcagcgaaagccggggacgctttgccaaaggatgcagatgctaacggtgcatattgtattgctctgaaaggcctttacgagatcaaacaaattactgaaaactggaaggaagatggaaagttttcccgtgataaattgaagatctctaataaggactggtttgactttatccaaaataaacgttattta

SEQ ID NO: 44 - protein, 1263 aa, synthetic construct
MNNGTNNFQNFIGISSLQKTLRNALIPTETTQQFIVKNGIIKEDELRGENRQILKDIMDDYYRGFISETLSSIDDIDWTSLFEKMEIQLKNGDNKDTLIKEQTEYRKAIHKKFANDDRFKNMFSAKLISDILPEFVIHNNNYSASEKEEKTQVIKLFSRFATSFKDYFKNRANCFSADDISSSSCHRIVNDNAEIFFSNALVYRRIVKSLSNDDINKISGDMKDSLKEMSLEEIYSYEKYGEFITQEGISFYNDICGKVNSFMNLYCQKNKENKNLYKLQKLHKQILCIADTSYEVPYKFESDEKVYQSVNGFLDNISSKHIVERLRKIGDNYNGYNLDKIYIVSKFYESVSQKTYRDWETINTALEIHYNNILPGNGKSKADKVKKAVKNDLQKSITEINELVSNYKLCSDDNIKAETYIHEISHILNNFEAQELKYNPEIHLVESELKASELKNVLDVIMNAFHWCSVFMTEELVDKDNNFYAELEEIYDEIYPVISLYNLVRNYVTQKPYSTKKIKLNFGIPTLADGWSKSKEYSNNAIILMRDNLYYLGIFNAKNKPDKKIIEGNTSENKGDYKKMIYNLLPGPNKMIPKVFLSSKTGVETYKPSAYILEGYKQNKHIKSSKDFDITFCHDLIDYFKNCIAIHPEWKNFGFDFSDTSTYEDISGFYREVELQGYKIDWTYISEKDIDLLQEKGQLYLFQIYNKDFSKKSTGNDNLHTMYLKNLFSEENLKDIVLKLNGEAEIFFRKSSIKNPIIHKKGSILVNRTYEAEEKDQFGNIQIVRKNIPENIYQELYKYFNDKSDKELSDEAAKLKNVVGHHEAATNIVKDYRYTYDKYFLHMPITINFKANKTGFINDRILQYIAKEKDLHVIGIDRGERNLIYVSVIDTCGNIVEQKSFNIVNGYDYQIKLKQQEGARQIARKEWKEIGKIKEIKEGYLSLVIHEISKMVIKYNAIIAMEDLSYGFKKGRFKVERQVYQKFETMLINKLNYLVFKDISITENGGLLKGYQLTYIPDKLKNVGHQCGCIFYVPAAYTSKIDPTTGFVNIFKFKDLTVDAKREFIKKFDSIRYDSEKNLFCFTFDYNNFITQNTVMSKSSWSVYTYGVRIKRRFVNGRFSNESDTIDITKDMEKTLEMTDINWRDGHDLRQDIIDYEIVQHIFEIFRLTVQMRNSLSELEDRDYDRLISPVLNENNIFYDSAKAGDALPKDADANGAYCIALKGLYEIKQITENWKEDGKFSRDKLKISNKDWFDFIQNKRYL

SEQ ID NO: 45 - DNA, 3789 bp, synthetic construct
  source 1..3789: mol_type = other DNA
atgaataacggtaccaataactttcaaaattttatcgggatctcctcgttgcaaaaaactcttcgtaatgctttaatcccgactgagacaacacagcagttcatcgttaaaaacggcatcattaaagaagatgagctgcgcggcgagaaccgtcagattttaaaggacatcatggacgactattaccgtgggttcatctcagaaacattaagcagcatcgatgatatcgactggacctcactgtttgagaagatggagattcaacttaagaatggagacaacaaagacactttaattaaggagcagacggaatatcgtaaagctatccataaaaaatttgcaaacgatgaccgtttcaaaaatatgttttccgcaaaattgattagcgacattttacctgaattcgtaatccataacaacaactattccgcatctgaaaaagaggagaagacccaagttatcaaacttttttcacgtttcgcgacatcttttaaagactactttaagaatcgtgcgaattgtttcagtgcagatgatatttcgtctagttcatgtcaccgtatcgtgaatgacaacgctgagattttcttttctaatgcgttggtgtatcgccgcatcgtaaagtccttgtcgaatgatgatatcaacaaaattagtggtgacatgaaagactccctgaaagaaatgtcattagaggagatttacagctacgaaaaatacggagagttcatcactcaggaaggtatctccttttacaacgatatttgcggcaaagttaatagtttcatgaatctgtattgtcagaagaataaggaaaacaagaatctgtacaagttacaaaagcttcataaacagatcttgtgcatcgccgacacgtcttatgaagtcccgtataaatttgaaagcgacgaagaagtaaaacagagtgtgaatggattcttggacaatatctcatcaaaacacattgttgaacgtttgcgcaaaatcggcgacaactataacggatacaacttggataaaatttatatcgtatcaaaattttatgaatcagtatcccaaaagacttaccgtgattgggagactattaatacggcgttagaaatccattacaacaacattctgccgggtaacggtaaatcgaaagcggacaaagtgaagaaggcggttaagaacgatcttcagaagtctatcacggagattaatgagctggtttccaattacaagttgtgctcggatgataacatcaaagctgaaacctatatccatgaaatttctcatattcttaataacttcgaggcacaagaattaaaatataacccagaaattcatctggttgagagcgaacttaaagcttcagaattaaaaaatgttttggacgtaattatgaacgccttccattggtgcagcgtgtttatgacagaggagttagtagataaggataacaacttttatgcagaattggaagagatctatgatgagatctatccagtgatttcactgtataacttagtccgtaattacgtcactcagaagccgtactcaactaaaaagatcaagttaaattttggaattccgacattggcggatggttggagtaagtctaaggaatactcaaataacgctattatcttaatgcgtgacaacctgtattacttgggtattttcaatgccaaaaataagcccgataaaaaaatcattgaagggaatacttcagaaaataagggagattacaaaaaaatgatttataaccttttgccaggcccaaacaaaatgatccccaaggtgtttttgagtagtaagacgggagtagaaacatataagccatcagcgtacattcttgaagggtacaaacaaaataaacacatcaagagcagcaaggactttgacattacattttgtcatgacttaatcgactactttaaaaattgcattgccattcaccctgagtggaaaaattttggtttcgacttcagtgatacctctacctatgaagatatctctggtttttatcgtgaggtagaacttcagggttacaagatcgattggacgtacatttccgagaaagacattgatcttttacaagagaagggtcagctttacttatttcagatctacaataaagacttttcgaaaaaatccacgggcaacgacaaccttcatacaatgtacttaaagaacctgttctctgaagaaaacttgaaagatatcgtgcttaaattgaatggcgaggccgagatttttttccgtaaaagctcgattaagaatcccatcatccacaagaaaggcagcattctggtaaatcgtacctatgaagcggaggaaaaggaccaatttggtaatattcagattgtccgtaagaacatccctgaaaatatctatcaagaattatataaatatttcaacgataagtcggacaaggaacttagcgatgaagccgcgaagttgaaaaatgttgttggtcaccacgaagcagcaacaaacattgtgaaagactatcgctacacttacgataagtactttttacatatgcctattacgattaactttaaggcaaataagacaggttttatcaacgaccgtatcctgcaatatattgcaaaagagaaggacctgcatgtcattgggattgatcgcggtgaacgcaatctgatttacgtgagtgttattgatacctgcggtaatattgttgagcaaaagtcttttaatatcgttaatggttacgactaccaaattaagcttaaacaacaggaaggtgcccgccagatcgcccgtaaggagtggaaggaaatcggaaaaattaaggaaatcaaagagggatatctgagcttggttattcatgaaatctcaaagatggttattaagtacaacgccatcatcgctatggaagacttatcgtatgggtttaaaaagggtcgtttcaaagttgagcgccaggtctaccaaaagtttgaaacgatgcttattaataaattaaactacttggttttcaaagatatctctattaccgagaatggaggtttactgaaaggataccagttaacgtatatccccgataagcttaaaaacgtgggccatcagtgtggctgtattttctatgtgcccgcggcatatacatcaaaaattgacccgacgacgggtttcgttaatatcttcaagttcaaagatctgacagttgatgcaaaacgcgaattcattaagaagttcgatagtattcgctatgactccgagaaaaatttgttttgcttcacttttgactacaataactttattactcagaatacagtcatgagtaaaagctcctggtcggtttacacgtacggggtacgcatcaaacgtcgttttgtgaatggtcgttttagtaatgagtcggatacaattgatattaccaaggatatggagaagactctggaaatgacagacatcaattggcgtgatggacatgatttgcgtcaggacattatcgactatgagattgtgcagcatattttcgaaatttttcgcctgacggtgcaaatgcgtaattccttaagcgaactggaagatcgcgactatgaccgcttaatttctcctgtgctgaatgagaacaacatcttctatgactcagcgaaagccggggacgctttgccaaaggatgcagatgctaacggtgcatattgtattgctctgaaaggcctttacgagatcaaacaaattactgaaaactggaaggaagatggaaagttttcccgtgataaattgaagatctctaataaggactggtttgactttatccaaaataaacgttattta

SEQ ID NO: 46 - protein, 1263 aa, synthetic construct
MNNGTNNFQNFIGISSLQKTLRNALIPTETTQQFIVKNGIIKEDELRGENRQILKDIMDDYYRGFISETLSSIDDIDWTSLFEKMEIQLKNGDNKDTLIKEQTEYRKAIHKKFANDDRFKNMFSAKLISDILPEFVIHNNNYSASEKEEKTQVIKLFSRFATSFKDYFKNRANCFSADDISSSSCHRIVNDNAEIFFSNALVYRRIVKSLSNDDINKISGDMKDSLKEMSLEEIYSYEKYGEFITQEGISFYNDICGKVNSFMNLYCQKNKENKNLYKLQKLHKQILCIADTSYEVPYKFESDEEVKQSVNGFLDNISSKHIVERLRKIGDNYNGYNLDKIYIVSKFYESVSQKTYRDWETINTALEIHYNNILPGNGKSKADKVKKAVKNDLQKSITEINELVSNYKLCSDDNIKAETYIHEISHILNNFEAQELKYNPEIHLVESELKASELKNVLDVIMNAFHWCSVFMTEELVDKDNNFYAELEEIYDEIYPVISLYNLVRNYVTQKPYSTKKIKLNFGIPTLADGWSKSKEYSNNAIILMRDNLYYLGIFNAKNKPDKKIIEGNTSENKGDYKKMIYNLLPGPNKMIPKVFLSSKTGVETYKPSAYILEGYKQNKHIKSSKDFDITFCHDLIDYFKNCIAIHPEWKNFGFDFSDTSTYEDISGFYREVELQGYKIDWTYISEKDIDLLQEKGQLYLFQIYNKDFSKKSTGNDNLHTMYLKNLFSEENLKDIVLKLNGEAEIFFRKSSIKNPIIHKKGSILVNRTYEAEEKDQFGNIQIVRKNIPENIYQELYKYFNDKSDKELSDEAAKLKNVVGHHEAATNIVKDYRYTYDKYFLHMPITINFKANKTGFINDRILQYIAKEKDLHVIGIDRGERNLIYVSVIDTCGNIVEQKSFNIVNGYDYQIKLKQQEGARQIARKEWKEIGKIKEIKEGYLSLVIHEISKMVIKYNAIIAMEDLSYGFKKGRFKVERQVYQKFETMLINKLNYLVFKDISITENGGLLKGYQLTYIPDKLKNVGHQCGCIFYVPAAYTSKIDPTTGFVNIFKFKDLTVDAKREFIKKFDSIRYDSEKNLFCFTFDYNNFITQNTVMSKSSWSVYTYGVRIKRRFVNGRFSNESDTIDITKDMEKTLEMTDINWRDGHDLRQDIIDYEIVQHIFEIFRLTVQMRNSLSELEDRDYDRLISPVLNENNIFYDSAKAGDALPKDADANGAYCIALKGLYEIKQITENWKEDGKFSRDKLKISNKDWFDFIQNKRYL

SEQ ID NO: 47 - DNA, 3789 bp, synthetic construct
  source 1..3789: mol_type = other DNA
atgaataacggtaccaataactttcaaaattttatcgggatctcctcgttgcaaaaaactcttcgtaatgctttaatcccgactgagacaacacagcagttcatcgttaaaaacggcatcattaaagaagatgagctgcgcggcgagaaccgtcagattttaaaggacatcatggacgactattaccgtgggttcatctcagaaacattaagcagcatcgatgatatcgactggacctcactgtttgagaagatggagattcaacttaagaatggagacaacaaagacactttaattaaggagcagacggaatatcgtaaagctatccataaaaaatttgcaaacgatgaccgtttcaaaaatatgttttccgcaaaattgattagcgacattttacctgaattcgtaatccataacaacaactattccgcatctgaaaaagaggagaagacccaagttatcaaacttttttcacgtttcgcgacatcttttaaagactactttaagaatcgtgcgaattgtttcagtgcagatgatatttcgtctagttcatgtcaccgtatcgtgaatgacaacgctgagattttcttttctaatgcgttggtgtatcgccgcatcgtaaagtccttgtcgaatgatgatatcaacaaaattagtggtgacatgaaagactccctgaaagaaatgtcattagaggagatttacagctacgaaaaatacggagagttcatcactcaggaaggtatctccttttacaacgatatttgcggcaaagttaatagtttcatgaatctgtattgtcagaagaataaggaaaacaagaatctgtacaagttacaaaagcttcataaacagatcttgtgcatcgccgacacgtcttatgaagtcccgtataaatttgaaagcgacgaagaagtatatcagagtgtgaatggattcttggacaatatctcatcaaaacacattgttgaacgtttgcgcaaaatcggcgacaactataacggatacaacttggataaaatttatatcgtatcaaaattttatgaatcagtatcccgtaagacttaccgtgattgggagactattaatacggcgttagaaatccattacaacaacattctgccgggtaacggtaaatcgaaagcggacaaagtgaagaaggcggttaagaacgatcttcagaagtctatcacggagattaatgagctggtttccaattacaagttgtgctcggatgataacatcaaagctgaaacctatatccatgaaatttctcatattcttaataacttcgaggcacaagaattaaaatataacccagaaattcatctggttgagagcgaacttaaagcttcagaattaaaaaatgttttggacgtaattatgaacgccttccattggtgcagcgtgtttatgacagaggagttagtagataaggataacaacttttatgcagaattggaagagatctatgatgagatctatccagtgatttcactgtataacttagtccgtaattacgtcactcagaagccgtactcaactaaaaagatcaagttaaattttggaattccgacattggcggatggttggagtaagtctaaggaatactcaaataacgctattatcttaatgcgtgacaacctgtattacttgggtattttcaatgccaaaaataagcccgataaaaaaatcattgaagggaatacttcagaaaataagggagattacaaaaaaatgatttataaccttttgccaggcccaaacaaaatgatccccaaggtgtttttgagtagtaagacgggagtagaaacatataagccatcagcgtacattcttgaagggtacaaacaaaataaacacatcaagagcagcaaggactttgacattacattttgtcatgacttaatcgactactttaaaaattgcattgccattcaccctgagtggaaaaattttggtttcgacttcagtgatacctctacctatgaagatatctctggtttttatcgtgaggtagaacttcagggttacaagatcgattggacgtacatttccgagaaagacattgatcttttacaagagaagggtcagctttacttatttcagatctacaataaagacttttcgaaaaaatccacgggcaacgacaaccttcatacaatgtacttaaagaacctgttctctgaagaaaacttgaaagatatcgtgcttaaattgaatggcgaggccgagatttttttccgtaaaagctcgattaagaatcccatcatccacaagaaaggcagcattctggtaaatcgtacctatgaagcggaggaaaaggaccaatttggtaatattcagattgtccgtaagaacatccctgaaaatatctatcaagaattatataaatatttcaacgataagtcggacaaggaacttagcgatgaagccgcgaagttgaaaaatgttgttggtcaccacgaagcagcaacaaacattgtgaaagactatcgctacacttacgataagtactttttacatatgcctattacgattaactttaaggcaaataagacaggttttatcaacgaccgtatcctgcaatatattgcaaaagagaaggacctgcatgtcattgggattgatcgcggtgaacgcaatctgatttacgtgagtgttattgatacctgcggtaatattgttgagcaaaagtcttttaatatcgttaatggttacgactaccaaattaagcttaaacaacaggaaggtgcccgccagatcgcccgtaaggagtggaaggaaatcggaaaaattaaggaaatcaaagagggatatctgagcttggttattcatgaaatctcaaagatggttattaagtacaacgccatcatcgctatggaagacttatcgtatgggtttaaaaagggtcgtttcaaagttgagcgccaggtctaccaaaagtttgaaacgatgcttattaataaattaaactacttggttttcaaagatatctctattaccgagaatggaggtttactgaaaggataccagttaacgtatatccccgataagcttaaaaacgtgggccatcagtgtggctgtattttctatgtgcccgcggcatatacatcaaaaattgacccgacgacgggtttcgttaatatcttcaagttcaaagatctgacagttgatgcaaaacgcgaattcattaagaagttcgatagtattcgctatgactccgagaaaaatttgttttgcttcacttttgactacaataactttattactcagaatacagtcatgagtaaaagctcctggtcggtttacacgtacggggtacgcatcaaacgtcgttttgtgaatggtcgttttagtaatgagtcggatacaattgatattaccaaggatatggagaagactctggaaatgacagacatcaattggcgtgatggacatgatttgcgtcaggacattatcgactatgagattgtgcagcatattttcgaaatttttcgcctgacggtgcaaatgcgtaattccttaagcgaactggaagatcgcgactatgaccgcttaatttctcctgtgctgaatgagaacaacatcttctatgactcagcgaaagccggggacgctttgccaaaggatgcagatgctaacggtgcatattgtattgctctgaaaggcctttacgagatcaaacaaattactgaaaactggaaggaagatggaaagttttcccgtgataaattgaagatctctaataaggactggtttgactttatccaaaataaacgttattta

SEQ ID NO: 48 - protein, 1263 aa, synthetic construct
MNNGTNNFQNFIGISSLQKTLRNALIPTETTQQFIVKNGIIKEDELRGENRQILKDIMDDYYRGFISETLSSIDDIDWTSLFEKMEIQLKNGDNKDTLIKEQTEYRKAIHKKFANDDRFKNMFSAKLISDILPEFVIHNNNYSASEKEEKTQVIKLFSRFATSFKDYFKNRANCFSADDISSSSCHRIVNDNAEIFFSNALVYRRIVKSLSNDDINKISGDMKDSLKEMSLEEIYSYEKYGEFITQEGISFYNDICGKVNSFMNLYCQKNKENKNLYKLQKLHKQILCIADTSYEVPYKFESDEEVYQSVNGFLDNISSKHIVERLRKIGDNYNGYNLDKIYIVSKFYESVSRKTYRDWETINTALEIHYNNILPGNGKSKADKVKKAVKNDLQKSITEINELVSNYKLCSDDNIKAETYIHEISHILNNFEAQELKYNPEIHLVESELKASELKNVLDVIMNAFHWCSVFMTEELVDKDNNFYAELEEIYDEIYPVISLYNLVRNYVTQKPYSTKKIKLNFGIPTLADGWSKSKEYSNNAIILMRDNLYYLGIFNAKNKPDKKIIEGNTSENKGDYKKMIYNLLPGPNKMIPKVFLSSKTGVETYKPSAYILEGYKQNKHIKSSKDFDITFCHDLIDYFKNCIAIHPEWKNFGFDFSDTSTYEDISGFYREVELQGYKIDWTYISEKDIDLLQEKGQLYLFQIYNKDFSKKSTGNDNLHTMYLKNLFSEENLKDIVLKLNGEAEIFFRKSSIKNPIIHKKGSILVNRTYEAEEKDQFGNIQIVRKNIPENIYQELYKYFNDKSDKELSDEAAKLKNVVGHHEAATNIVKDYRYTYDKYFLHMPITINFKANKTGFINDRILQYIAKEKDLHVIGIDRGERNLIYVSVIDTCGNIVEQKSFNIVNGYDYQIKLKQQEGARQIARKEWKEIGKIKEIKEGYLSLVIHEISKMVIKYNAIIAMEDLSYGFKKGRFKVERQVYQKFETMLINKLNYLVFKDISITENGGLLKGYQLTYIPDKLKNVGHQCGCIFYVPAAYTSKIDPTTGFVNIFKFKDLTVDAKREFIKKFDSIRYDSEKNLFCFTFDYNNFITQNTVMSKSSWSVYTYGVRIKRRFVNGRFSNESDTIDITKDMEKTLEMTDINWRDGHDLRQDIIDYEIVQHIFEIFRLTVQMRNSLSELEDRDYDRLISPVLNENNIFYDSAKAGDALPKDADANGAYCIALKGLYEIKQITENWKEDGKFSRDKLKISNKDWFDFIQNKRYL

SEQ ID NO: 49 - DNA, 3789 bp, synthetic construct
  source 1..3789: mol_type = other DNA
atgaataacggtaccaataactttcaaaattttatcgggatctcctcgttgcaaaaaactcttcgtaatgctttaatcccgactgagacaacacagcagttcatcgttaaaaacggcatcattaaagaagatgagctgcgcggcgagaaccgtcagattttaaaggacatcatggacgactattaccgtgggttcatctcagaaacattaagcagcatcgatgatatcgactggacctcactgtttgagaagatggagattcaacttaagaatggagacaacaaagacactttaattaaggagcagacggaatatcgtaaagctatccataaaaaatttgcaaacgatgaccgtttcaaaaatatgttttccgcaaaattgattagcgacattttacctgaattcgtaatccataacaacaactattccgcatctgaaaaagaggagaagacccaagttatcaaacttttttcacgtttcgcgacatcttttaaagactactttaagaatcgtgcgaattgtttcagtgcagatgatatttcgtctagttcatgtcaccgtatcgtgaatgacaacgctgagattttcttttctaatgcgttggtgtatcgccgcatcgtaaagtccttgtcgaatgatgatatcaacaaaattagtggtgacatgaaagactccctgaaagaaatgtcattagaggagatttacagctacgaaaaatacggagagttcatcactcaggaaggtatctccttttacaacgatatttgcggcaaagttaatagtttcatgaatctgtattgtcagaagaataaggaaaacaagaatctgtacaagttacaaaagcttcataaacagatcttgtgcatcgccgacacgtcttatgaagtcccgtataaatttgaaagcgacgaagaagtatatcagagtgtgaatggattcttggacaatatctcatcaaaacacattgttgaacgtttgcgcaaaatcggcgacaactataacggatacaacttggataaaatttatatcgtatcaaaattttatgaatcagtatcccaaaagacttaccgtgattgggagactattaatacggcgttagaaatccattacaacaacattctgccgggtaacggtaaatcgaaagcggacaaagtgaagaaggcggttaagaacgatcttcagaagtctatcacggagattaatgagctggtttccaattacaagttgtgctcggatgataacatcaaagctgaaacctatatccatgaaatttctcatattcttaataacttcgaggcacaagaattaaaatataacccagaaattcattgggttgagagcgaacttaaagcttcagaattaaaaaatgttttggacgtaattatgaacgccttccattggtgcagcgtgtttatgacagaggagttagtagataaggataacaacttttatgcagaattggaagagatctatgatgagatctatccagtgatttcactgtataacttagtccgtaattacgtcactcagaagccgtactcaactaaaaagatcaagttaaattttggaattccgacattggcggatggttggagtaagtctaaggaatactcaaataacgctattatcttaatgcgtgacaacctgtattacttgggtattttcaatgccaaaaataagcccgataaaaaaatcattgaagggaatacttcagaaaataagggagattacaaaaaaatgatttataaccttttgccaggcccaaacaaaatgatccccaaggtgtttttgagtagtaagacgggagtagaaacatataagccatcagcgtacattcttgaagggtacaaacaaaataaacacatcaagagcagcaaggactttgacattacattttgtcatgacttaatcgactactttaaaaattgcattgccattcaccctgagtggaaaaattttggtttcgacttcagtgatacctctacctatgaagatatctctggtttttatcgtgaggtagaacttcagggttacaagatcgattggacgtacatttccgagaaagacattgatcttttacaagagaagggtcagctttacttatttcagatctacaataaagacttttcgaaaaaatccacgggcaacgacaaccttcatacaatgtacttaaagaacctgttctctgaagaaaacttgaaagatatcgtgcttaaattgaatggcgaggccgagatttttttccgtaaaagctcgattaagaatcccatcatccacaagaaaggcagcattctggtaaatcgtacctatgaagcggaggaaaaggaccaatttggtaatattcagattgtccgtaagaacatccctgaaaatatctatcaagaattatataaatatttcaacgataagtcggacaaggaacttagcgatgaagccgcgaagttgaaaaatgttgttggtcaccacgaagcagcaacaaacattgtgaaagactatcgctacacttacgataagtactttttacatatgcctattacgattaactttaaggcaaataagacaggttttatcaacgaccgtatcctgcaatatattgcaaaagagaaggacctgcatgtcattgggattgatcgcggtgaacgcaatctgatttacgtgagtgttattgatacctgcggtaatattgttgagcaaaagtcttttaatatcgttaatggttacgactaccaaattaagcttaaacaacaggaaggtgcccgccagatcgcccgtaaggagtggaaggaaatcggaaaaattaaggaaatcaaagagggatatctgagcttggttattcatgaaatctcaaagatggttattaagtacaacgccatcatcgctatggaagacttatcgtatgggtttaaaaagggtcgtttcaaagttgagcgccaggtctaccaaaagtttgaaacgatgcttattaataaattaaactacttggttttcaaagatatctctattaccgagaatggaggtttactgaaaggataccagttaacgtatatccccgataagcttaaaaacgtgggccatcagtgtggctgtattttctatgtgcccgcggcatatacatcaaaaattgacccgacgacgggtttcgttaatatcttcaagttcaaagatctgacagttgatgcaaaacgcgaattcattaagaagttcgatagtattcgctatgactccgagaaaaatttgttttgcttcacttttgactacaataactttattactcagaatacagtcatgagtaaaagctcctggtcggtttacacgtacggggtacgcatcaaacgtcgttttgtgaatggtcgttttagtaatgagtcggatacaattgatattaccaaggatatggagaagactctggaaatgacagacatcaattggcgtgatggacatgatttgcgtcaggacattatcgactatgagattgtgcagcatattttcgaaatttttcgcctgacggtgcaaatgcgtaattccttaagcgaactggaagatcgcgactatgaccgcttaatttctcctgtgctgaatgagaacaacatcttctatgactcagcgaaagccggggacgctttgccaaaggatgcagatgctaacggtgcatattgtattgctctgaaaggcctttacgagatcaaacaaattactgaaaactggaaggaagatggaaagttttcccgtgataaattgaagatctctaataaggactggtttgactttatccaaaataaacgttattta

SEQ ID NO: 50 - protein, 1263 aa, synthetic construct
MNNGTNNFQNFIGISSLQKTLRNALIPTETTQQFIVKNGIIKEDELRGENRQILKDIMDDYYRGFISETLSSIDDIDWTSLFEKMEIQLKNGDNKDTLIKEQTEYRKAIHKKFANDDRFKNMFSAKLISDILPEFVIHNNNYSASEKEEKTQVIKLFSRFATSFKDYFKNRANCFSADDISSSSCHRIVNDNAEIFFSNALVYRRIVKSLSNDDINKISGDMKDSLKEMSLEEIYSYEKYGEFITQEGISFYNDICGKVNSFMNLYCQKNKENKNLYKLQKLHKQILCIADTSYEVPYKFESDEEVYQSVNGFLDNISSKHIVERLRKIGDNYNGYNLDKIYIVSKFYESVSQKTYRDWETINTALEIHYNNILPGNGKSKADKVKKAVKNDLQKSITEINELVSNYKLCSDDNIKAETYIHEISHILNNFEAQELKYNPEIHWVESELKASELKNVLDVIMNAFHWCSVFMTEELVDKDNNFYAELEEIYDEIYPVISLYNLVRNYVTQKPYSTKKIKLNFGIPTLADGWSKSKEYSNNAIILMRDNLYYLGIFNAKNKPDKKIIEGNTSENKGDYKKMIYNLLPGPNKMIPKVFLSSKTGVETYKPSAYILEGYKQNKHIKSSKDFDITFCHDLIDYFKNCIAIHPEWKNFGFDFSDTSTYEDISGFYREVELQGYKIDWTYISEKDIDLLQEKGQLYLFQIYNKDFSKKSTGNDNLHTMYLKNLFSEENLKDIVLKLNGEAEIFFRKSSIKNPIIHKKGSILVNRTYEAEEKDQFGNIQIVRKNIPENIYQELYKYFNDKSDKELSDEAAKLKNVVGHHEAATNIVKDYRYTYDKYFLHMPITINFKANKTGFINDRILQYIAKEKDLHVIGIDRGERNLIYVSVIDTCGNIVEQKSFNIVNGYDYQIKLKQQEGARQIARKEWKEIGKIKEIKEGYLSLVIHEISKMVIKYNAIIAMEDLSYGFKKGRFKVERQVYQKFETMLINKLNYLVFKDISITENGGLLKGYQLTYIPDKLKNVGHQCGCIFYVPAAYTSKIDPTTGFVNIFKFKDLTVDAKREFIKKFDSIRYDSEKNLFCFTFDYNNFITQNTVMSKSSWSVYTYGVRIKRRFVNGRFSNESDTIDITKDMEKTLEMTDINWRDGHDLRQDIIDYEIVQHIFEIFRLTVQMRNSLSELEDRDYDRLISPVLNENNIFYDSAKAGDALPKDADANGAYCIALKGLYEIKQITENWKEDGKFSRDKLKISNKDWFDFIQNKRYL

SEQ ID NO: 51 - DNA, 3789 bp, synthetic construct
  source 1..3789: mol_type = other DNA
atgaataacggtaccaataactttcaaaattttatcgggatctcctcgttgcaaaaaactcttcgtaatgctttaatcccgactgagacaacacagcagttcatcgttaaaaacggcatcattaaagaagatgagctgcgcggcgagaaccgtcagattttaaaggacatcatggacgactattaccgtgggttcatctcagaaacattaagcagcatcgatgatatcgactggacctcactgtttgagaagatggagattcaacttaagaatggagacaacaaagacactttaattaaggagcagacggaatatcgtaaagctatccataaaaaatttgcaaacgatgaccgtttcaaaaatatgttttccgcaaaattgattagcgacattttacctgaattcgtaatccataacaacaactattccgcatctgaaaaagaggagaagacccaagttatcaaacttttttcacgtttcgcgacatcttttaaagactactttaagaatcgtgcgaattgtttcagtgcagatgatatttcgtctagttcatgtcaccgtatcgtgaatgacaacgctgagattttcttttctaatgcgttggtgtatcgccgcatcgtaaagtccttgtcgaatgatgatatcaacaaaattagtggtgacatgaaagactccctgaaagaaatgtcattagaggagatttacagctacgaaaaatacggagagttcatcactcaggaaggtatctccttttacaacgatatttgcggcaaagttaatagtttcatgaatctgtattgtcagaagaataaggaaaacaagaatctgtacaagttacaaaagcttcataaacagatcttgtgcatcgccgacacgtcttatgaagtcccgtataaatttgaaagcgacgaagaagtatatcagagtgtgaatggattcttggacaatatctcatcaaaacacattgttgaacgtttgcgcaaaatcggcgacaactataacggatacaacttggataaaatttatatcgtatcaaaattttatgaatcagtatcccaaaagacttaccgtgattgggagactattaatacggcgttagaaatccattacaacaacattctgccgggtaacggtaaatcgaaagcggacaaagtgaagaaggcggttaagaacgatcttcagaagtctatcacggagattaatgagctggtttccaattacaagttgtgctcggatgataacatcaaagctgaaacctatatccatgaaatttctcatattcttaataacttcgaggcacaagaattaaaatataacccagaaattcatctggttgagagcgaacttaaagcttcagaattaaaaaatgttttggacgtaattatgaacgcccgtcattggtgcagcgtgtttatgacagaggagttagtagataaggataacaacttttatgcagaattggaagagatctatgatgagatctatccagtgatttcactgtataacttagtccgtaattacgtcactcagaagccgtactcaactaaaaagatcaagttaaattttggaattccgacattggcggatggttggagtaagtctaaggaatactcaaataacgctattatcttaatgcgtgacaacctgtattacttgggtattttcaatgccaaaaataagcccgataaaaaaatcattgaagggaatacttcagaaaataagggagattacaaaaaaatgatttataaccttttgccaggcccaaacaaaatgatccccaaggtgtttttgagtagtaagacgggagtagaaacatataagccatcagcgtacattcttgaagggtacaaacaaaataaacacatcaagagcagcaaggactttgacattacattttgtcatgacttaatcgactactttaaaaattgcattgccattcaccctgagtggaaaaattttggtttcgacttcagtgatacctctacctatgaagatatctctggtttttatcgtgaggtagaacttcagggttacaagatcgattggacgtacatttccgagaaagacattgatcttttacaagagaagggtcagctttacttatttcagatctacaataaagacttttcgaaaaaatccacgggcaacgacaaccttcatacaatgtacttaaagaacctgttctctgaagaaaacttgaaagatatcgtgcttaaattgaatggcgaggccgagatttttttccgtaaaagctcgattaagaatcccatcatccacaagaaaggcagcattctggtaaatcgtacctatgaagcggaggaaaaggaccaatttggtaatattcagattgtccgtaagaacatccctgaaaatatctatcaagaattatataaatatttcaacgataagtcggacaaggaacttagcgatgaagccgcgaagttgaaaaatgttgttggtcaccacgaagcagcaacaaacattgtgaaagactatcgctacacttacgataagtactttttacatatgcctattacgattaactttaaggcaaataagacaggttttatcaacgaccgtatcctgcaatatattgcaaaagagaaggacctgcatgtcattgggattgatcgcggtgaacgcaatctgatttacgtgagtgttattgatacctgcggtaatattgttgagcaaaagtcttttaatatcgttaatggttacgactaccaaattaagcttaaacaacaggaaggtgcccgccagatcgcccgtaaggagtggaaggaaatcggaaaaattaaggaaatcaaagagggatatctgagcttggttattcatgaaatctcaaagatggttattaagtacaacgccatcatcgctatggaagacttatcgtatgggtttaaaaagggtcgtttcaaagttgagcgccaggtctaccaaaagtttgaaacgatgcttattaataaattaaactacttggttttcaaagatatctctattaccgagaatggaggtttactgaaaggataccagttaacgtatatccccgataagcttaaaaacgtgggccatcagtgtggctgtattttctatgtgcccgcggcatatacatcaaaaattgacccgacgacgggtttcgttaatatcttcaagttcaaagatctgacagttgatgcaaaacgcgaattcattaagaagttcgatagtattcgctatgactccgagaaaaatttgttttgcttcacttttgactacaataactttattactcagaatacagtcatgagtaaaagctcctggtcggtttacacgtacggggtacgcatcaaacgtcgttttgtgaatggtcgttttagtaatgagtcggatacaattgatattaccaaggatatggagaagactctggaaatgacagacatcaattggcgtgatggacatgatttgcgtcaggacattatcgactatgagattgtgcagcatattttcgaaatttttcgcctgacggtgcaaatgcgtaattccttaagcgaactggaagatcgcgactatgaccgcttaatttctcctgtgctgaatgagaacaacatcttctatgactcagcgaaagccggggacgctttgccaaaggatgcagatgctaacggtgcatattgtattgctctgaaaggcctttacgagatcaaacaaattactgaaaactggaaggaagatggaaagttttcccgtgataaattgaagatctctaataaggactggtttgactttatccaaaataaacgttattta

SEQ ID NO: 52 - protein, 1263 aa, synthetic construct
MNNGTNNFQNFIGISSLQKTLRNALIPTETTQQFIVKNGIIKEDELRGENRQILKDIMDDYYRGFISETLSSIDDIDWTSLFEKMEIQLKNGDNKDTLIKEQTEYRKAIHKKFANDDRFKNMFSAKLISDILPEFVIHNNNYSASEKEEKTQVIKLFSRFATSFKDYFKNRANCFSADDISSSSCHRIVNDNAEIFFSNALVYRRIVKSLSNDDINKISGDMKDSLKEMSLEEIYSYEKYGEFITQEGISFYNDICGKVNSFMNLYCQKNKENKNLYKLQKLHKQILCIADTSYEVPYKFESDEEVYQSVNGFLDNISSKHIVERLRKIGDNYNGYNLDKIYIVSKFYESVSQKTYRDWETINTALEIHYNNILPGNGKSKADKVKKAVKNDLQKSITEINELVSNYKLCSDDNIKAETYIHEISHILNNFEAQELKYNPEIHLVESELKASELKNVLDVIMNARHWCSVFMTEELVDKDNNFYAELEEIYDEIYPVISLYNLVRNYVTQKPYSTKKIKLNFGIPTLADGWSKSKEYSNNAIILMRDNLYYLGIFNAKNKPDKKIIEGNTSENKGDYKKMIYNLLPGPNKMIPKVFLSSKTGVETYKPSAYILEGYKQNKHIKSSKDFDITFCHDLIDYFKNCIAIHPEWKNFGFDFSDTSTYEDISGFYREVELQGYKIDWTYISEKDIDLLQEKGQLYLFQIYNKDFSKKSTGNDNLHTMYLKNLFSEENLKDIVLKLNGEAEIFFRKSSIKNPIIHKKGSILVNRTYEAEEKDQFGNIQIVRKNIPENIYQELYKYFNDKSDKELSDEAAKLKNVVGHHEAATNIVKDYRYTYDKYFLHMPITINFKANKTGFINDRILQYIAKEKDLHVIGIDRGERNLIYVSVIDTCGNIVEQKSFNIVNGYDYQIKLKQQEGARQIARKEWKEIGKIKEIKEGYLSLVIHEISKMVIKYNAIIAMEDLSYGFKKGRFKVERQVYQKFETMLINKLNYLVFKDISITENGGLLKGYQLTYIPDKLKNVGHQCGCIFYVPAAYTSKIDPTTGFVNIFKFKDLTVDAKREFIKKFDSIRYDSEKNLFCFTFDYNNFITQNTVMSKSSWSVYTYGVRIKRRFVNGRFSNESDTIDITKDMEKTLEMTDINWRDGHDLRQDIIDYEIVQHIFEIFRLTVQMRNSLSELEDRDYDRLISPVLNENNIFYDSAKAGDALPKDADANGAYCIALKGLYEIKQITENWKEDGKFSRDKLKISNKDWFDFIQNKRYL

SEQ ID NO: 53 - DNA, 3789 bp, synthetic construct
  source 1..3789: mol_type = other DNA
atgaataacggtaccaataactttcaaaattttatcgggatctcctcgttgcaaaaaactcttcgtaatgctttaatcccgactgagacaacacagcagttcatcgttaaaaacggcatcattaaagaagatgagctgcgcggcgagaaccgtcagattttaaaggacatcatggacgactattaccgtgggttcatctcagaaacattaagcagcatcgatgatatcgactggacctcactgtttgagaagatggagattcaacttaagaatggagacaacaaagacactttaattaaggagcagacggaatatcgtaaagctatccataaaaaatttgcaaacgatgaccgtttcaaaaatatgttttccgcaaaattgattagcgacattttacctgaattcgtaatccataacaacaactattccgcatctgaaaaagaggagaagacccaagttatcaaacttttttcacgtttcgcgacatcttttaaagactactttaagaatcgtgcgaattgtttcagtgcagatgatatttcgtctagttcatgtcaccgtatcgtgaatgacaacgctgagattttcttttctaatgcgttggtgtatcgccgcatcgtaaagtccttgtcgaatgatgatatcaacaaaattagtggtgacatgaaagactccctgaaagaaatgtcattagaggagatttacagctacgaaaaatacggagagttcatcactcaggaaggtatctccttttacaacgatatttgcggcaaagttaatagtttcatgaatctgtattgtcagaagaataaggaaaacaagaatctgtacaagttacaaaagcttcataaacagatcttgtgcatcgccgacacgtcttatgaagtcccgtataaatttgaaagcgacgaagaagtatatcagagtgtgaatggattcttggacaatatctcatcaaaacacattgttgaacgtttgcgcaaaatcggcgacaactataacggatacaacttggataaaatttatatcgtatcaaaattttatgaatcagtatcccaaaagacttaccgtgattgggagactattaatacggcgttagaaatccattacaacaacattctgccgggtaacggtaaatcgaaagcggacaaagtgaagaaggcggttaagaacgatcttcagaagtctatcacggagattaatgagctggtttccaattacaagttgtgctcggatgataacatcaaagctgaaacctatatccatgaaatttctcatattcttaataacttcgaggcacaagaattaaaatataacccagaaattcatctggttgagagcgaacttaaagcttcagaattaaaaaatgttttggacgtaattatgaacgccttccattggtgcaaagtgtttatgacagaggagttagtagataaggataacaacttttatgcagaattggaagagatctatgatgagatctatccagtgatttcactgtataacttagtccgtaattacgtcactcagaagccgtactcaactaaaaagatcaagttaaattttggaattccgacattggcggatggttggagtaagtctaaggaatactcaaataacgctattatcttaatgcgtgacaacctgtattacttgggtattttcaatgccaaaaataagcccgataaaaaaatcattgaagggaatacttcagaaaataagggagattacaaaaaaatgatttataaccttttgccaggcccaaacaaaatgatccccaaggtgtttttgagtagtaagacgggagtagaaacatataagccatcagcgtacattcttgaagggtacaaacaaaataaacacatcaagagcagcaaggactttgacattacattttgtcatgacttaatcgactactttaaaaattgcattgccattcaccctgagtggaaaaattttggtttcgacttcagtgatacctctacctatgaagatatctctggtttttatcgtgaggtagaacttcagggttacaagatcgattggacgtacatttccgagaaagacattgatcttttacaagagaagggtcagctttacttatttcagatctacaataaagacttttcgaaaaaatccacgggcaacgacaaccttcatacaatgtacttaaagaacctgttctctgaagaaaacttgaaagatatcgtgcttaaattgaatggcgaggccgagatttttttccgtaaaagctcgattaagaatcccatcatccacaagaaaggcagcattctggtaaatcgtacctatgaagcggaggaaaaggaccaatttggtaatattcagattgtccgtaagaacatccctgaaaatatctatcaagaattatataaatatttcaacgataagtcggacaaggaacttagcgatgaagccgcgaagttgaaaaatgttgttggtcaccacgaagcagcaacaaacattgtgaaagactatcgctacacttacgataagtactttttacatatgcctattacgattaactttaaggcaaataagacaggttttatcaacgaccgtatcctgcaatatattgcaaaagagaaggacctgcatgtcattgggattgatcgcggtgaacgcaatctgatttacgtgagtgttattgatacctgcggtaatattgttgagcaaaagtcttttaatatcgttaatggttacgactaccaaattaagcttaaacaacaggaaggtgcccgccagatcgcccgtaaggagtggaaggaaatcggaaaaattaaggaaatcaaagagggatatctgagcttggttattcatgaaatctcaaagatggttattaagtacaacgccatcatcgctatggaagacttatcgtatgggtttaaaaagggtcgtttcaaagttgagcgccaggtctaccaaaagtttgaaacgatgcttattaataaattaaactacttggttttcaaagatatctctattaccgagaatggaggtttactgaaaggataccagttaacgtatatccccgataagcttaaaaacgtgggccatcagtgtggctgtattttctatgtgcccgcggcatatacatcaaaaattgacccgacgacgggtttcgttaatatcttcaagttcaaagatctgacagttgatgcaaaacgcgaattcattaagaagttcgatagtattcgctatgactccgagaaaaatttgttttgcttcacttttgactacaataactttattactcagaatacagtcatgagtaaaagctcctggtcggtttacacgtacggggtacgcatcaaacgtcgttttgtgaatggtcgttttagtaatgagtcggatacaattgatattaccaaggatatggagaagactctggaaatgacagacatcaattggcgtgatggacatgatttgcgtcaggacattatcgactatgagattgtgcagcatattttcgaaatttttcgcctgacggtgcaaatgcgtaattccttaagcgaactggaagatcgcgactatgaccgcttaatttctcctgtgctgaatgagaacaacatcttctatgactcagcgaaagccggggacgctttgccaaaggatgcagatgctaacggtgcatattgtattgctctgaaaggcctttacgagatcaaacaaattactgaaaactggaaggaagatggaaagttttcccgtgataaattgaagatctctaataaggactggtttgactttatccaaaataaacgttattta

SEQ ID NO: 54 - protein, 1263 aa, synthetic construct
MNNGTNNFQNFIGISSLQKTLRNALIPTETTQQFIVKNGIIKEDELRGENRQILKDIMDDYYRGFISETLSSIDDIDWTSLFEKMEIQLKNGDNKDTLIKEQTEYRKAIHKKFANDDRFKNMFSAKLISDILPEFVIHNNNYSASEKEEKTQVIKLFSRFATSFKDYFKNRANCFSADDISSSSCHRIVNDNAEIFFSNALVYRRIVKSLSNDDINKISGDMKDSLKEMSLEEIYSYEKYGEFITQEGISFYNDICGKVNSFMNLYCQKNKENKNLYKLQKLHKQILCIADTSYEVPYKFESDEEVYQSVNGFLDNISSKHIVERLRKIGDNYNGYNLDKIYIVSKFYESVSQKTYRDWETINTALEIHYNNILPGNGKSKADKVKKAVKNDLQKSITEINELVSNYKLCSDDNIKAETYIHEISHILNNFEAQELKYNPEIHLVESELKASELKNVLDVIMNAFHWCKVFMTEELVDKDNNFYAELEEIYDEIYPVISLYNLVRNYVTQKPYSTKKIKLNFGIPTLADGWSKSKEYSNNAIILMRDNLYYLGIFNAKNKPDKKIIEGNTSENKGDYKKMIYNLLPGPNKMIPKVFLSSKTGVETYKPSAYILEGYKQNKHIKSSKDFDITFCHDLIDYFKNCIAIHPEWKNFGFDFSDTSTYEDISGFYREVELQGYKIDWTYISEKDIDLLQEKGQLYLFQIYNKDFSKKSTGNDNLHTMYLKNLFSEENLKDIVLKLNGEAEIFFRKSSIKNPIIHKKGSILVNRTYEAEEKDQFGNIQIVRKNIPENIYQELYKYFNDKSDKELSDEAAKLKNVVGHHEAATNIVKDYRYTYDKYFLHMPITINFKANKTGFINDRILQYIAKEKDLHVIGIDRGERNLIYVSVIDTCGNIVEQKSFNIVNGYDYQIKLKQQEGARQIARKEWKEIGKIKEIKEGYLSLVIHEISKMVIKYNAIIAMEDLSYGFKKGRFKVERQVYQKFETMLINKLNYLVFKDISITENGGLLKGYQLTYIPDKLKNVGHQCGCIFYVPAAYTSKIDPTTGFVNIFKFKDLTVDAKREFIKKFDSIRYDSEKNLFCFTFDYNNFITQNTVMSKSSWSVYTYGVRIKRRFVNGRFSNESDTIDITKDMEKTLEMTDINWRDGHDLRQDIIDYEIVQHIFEIFRLTVQMRNSLSELEDRDYDRLISPVLNENNIFYDSAKAGDALPKDADANGAYCIALKGLYEIKQITENWKEDGKFSRDKLKISNKDWFDFIQNKRYL

SEQ ID NO: 55 - DNA, 3789 bp, synthetic construct
  source 1..3789: mol_type = other DNA
atgaataacggtaccaataactttcaaaattttatcgggatctcctcgttgcaaaaaactcttcgtaatgctttaatcccgactgagacaacacagcagttcatcgttaaaaacggcatcattaaagaagatgagctgcgcggcgagaaccgtcagattttaaaggacatcatggacgactattaccgtgggttcatctcagaaacattaagcagcatcgatgatatcgactggacctcactgtttgagaagatggagattcaacttaagaatggagacaacaaagacactttaattaaggagcagacggaatatcgtaaagctatccataaaaaatttgcaaacgatgaccgtttcaaaaatatgttttccgcaaaattgattagcgacattttacctgaattcgtaatccataacaacaactattccgcatctgaaaaagaggagaagacccaagttatcaaacttttttcacgtttcgcgacatcttttaaagactactttaagaatcgtgcgaattgtttcagtgcagatgatatttcgtctagttcatgtcaccgtatcgtgaatgacaacgctgagattttcttttctaatgcgttggtgtatcgccgcatcgtaaagtccttgtcgaatgatgatatcaacaaaattagtggtgacatgaaagactccctgaaagaaatgtcattagaggagatttacagctacgaaaaatacggagagttcatcactcaggaaggtatctccttttacaacgatatttgcggcaaagttaatagtttcatgaatctgtattgtcagaagaataaggaaaacaagaatctgtacaagttacaaaagcttcataaacagatcttgtgcatcgccgacacgtcttatgaagtcccgtataaatttgaaagcgacgaagaagtatatcagagtgtgaatggattcttggacaatatctcatcaaaacacattgttgaacgtttgcgcaaaatcggcgacaactataacggatacaacttggataaaatttatatcgtatcaaaattttatgaatcagtatcccaaaagacttaccgtgattgggagactattaatacggcgttagaaatccattacaacaacattctgccgggtaacggtaaatcgaaagcggacaaagtgaagaaggcggttaagaacgatcttcagaagtctatcacggagattaatgagctggtttccaattacaagttgtgctcggatgataacatcaaagctgaaacctatatccatgaaatttctcatattcttaataacttcgaggcacaagaattaaaatataacccagaaattcatctggttgagagcgaacttaaagcttcagaattaaaaaatgttttggacgtaattatgaacgccttccattggtgcagcaaatttatgacagaggagttagtagataaggataacaacttttatgcagaattggaagagatctatgatgagatctatccagtgatttcactgtataacttagtccgtaattacgtcactcagaagccgtactcaactaaaaagatcaagttaaattttggaattccgacattggcggatggttggagtaagtctaaggaatactcaaataacgctattatcttaatgcgtgacaacctgtattacttgggtattttcaatgccaaaaataagcccgataaaaaaatcattgaagggaatacttcagaaaataagggagattacaaaaaaatgatttataaccttttgccaggcccaaacaaaatgatccccaaggtgtttttgagtagtaagacgggagtagaaacatataagccatcagcgtacattcttgaagggtacaaacaaaataaacacatcaagagcagcaaggactttgacattacattttgtcatgacttaatcgactactttaaaaattgcattgccattcaccctgagtggaaaaattttggtttcgacttcagtgatacctctacctatgaagatatctctggtttttatcgtgaggtagaacttcagggttacaagatcgattggacgtacatttccgagaaagacattgatcttttacaagagaagggtcagctttacttatttcagatctacaataaagacttttcgaaaaaatccacgggcaacgacaaccttcatacaatgtacttaaagaacctgttctctgaagaaaacttgaaagatatcgtgcttaaattgaatggcgaggccgagatttttttccgtaaaagctcgattaagaatcccatcatccacaagaaaggcagcattctggtaaatcgtacctatgaagcggaggaaaaggaccaatttggtaatattcagattgtccgtaagaacatccctgaaaatatctatcaagaattatataaatatttcaacgataagtcggacaaggaacttagcgatgaagccgcgaagttgaaaaatgttgttggtcaccacgaagcagcaacaaacattgtgaaagactatcgctacacttacgataagtactttttacatatgcctattacgattaactttaaggcaaataagacaggttttatcaacgaccgtatcctgcaatatattgcaaaagagaaggacctgcatgtcattgggattgatcgcggtgaacgcaatctgatttacgtgagtgttattgatacctgcggtaatattgttgagcaaaagtcttttaatatcgttaatggttacgactaccaaattaagcttaaacaacaggaaggtgcccgccagatcgcccgtaaggagtggaaggaaatcggaaaaattaaggaaatcaaagagggatatctgagcttggttattcatgaaatctcaaagatggttattaagtacaacgccatcatcgctatggaagacttatcgtatgggtttaaaaagggtcgtttcaaagttgagcgccaggtctaccaaaagtttgaaacgatgcttattaataaattaaactacttggttttcaaagatatctctattaccgagaatggaggtttactgaaaggataccagttaacgtatatccccgataagcttaaaaacgtgggccatcagtgtggctgtattttctatgtgcccgcggcatatacatcaaaaattgacccgacgacgggtttcgttaatatcttcaagttcaaagatctgacagttgatgcaaaacgcgaattcattaagaagttcgatagtattcgctatgactccgagaaaaatttgttttgcttcacttttgactacaataactttattactcagaatacagtcatgagtaaaagctcctggtcggtttacacgtacggggtacgcatcaaacgtcgttttgtgaatggtcgttttagtaatgagtcggatacaattgatattaccaaggatatggagaagactctggaaatgacagacatcaattggcgtgatggacatgatttgcgtcaggacattatcgactatgagattgtgcagcatattttcgaaatttttcgcctgacggtgcaaatgcgtaattccttaagcgaactggaagatcgcgactatgaccgcttaatttctcctgtgctgaatgagaacaacatcttctatgactcagcgaaagccggggacgctttgccaaaggatgcagatgctaacggtgcatattgtattgctctgaaaggcctttacgagatcaaacaaattactgaaaactggaaggaagatggaaagttttcccgtgataaattgaagatctctaataaggactggtttgactttatccaaaataaacgttattta

SEQ ID NO: 56 - protein, 1263 aa, synthetic construct
MNNGTNNFQNFIGISSLQKTLRNALIPTETTQQFIVKNGIIKEDELRGENRQILKDIMDDYYRGFISETLSSIDDIDWTSLFEKMEIQLKNGDNKDTLIKEQTEYRKAIHKKFANDDRFKNMFSAKLISDILPEFVIHNNNYSASEKEEKTQVIKLFSRFATSFKDYFKNRANCFSADDISSSSCHRIVNDNAEIFFSNALVYRRIVKSLSNDDINKISGDMKDSLKEMSLEEIYSYEKYGEFITQEGISFYNDICGKVNSFMNLYCQKNKENKNLYKLQKLHKQILCIADTSYEVPYKFESDEEVYQSVNGFLDNISSKHIVERLRKIGDNYNGYNLDKIYIVSKFYESVSQKTYRDWETINTALEIHYNNILPGNGKSKADKVKKAVKNDLQKSITEINELVSNYKLCSDDNIKAETYIHEISHILNNFEAQELKYNPEIHLVESELKASELKNVLDVIMNAFHWCSKFMTEELVDKDNNFYAELEEIYDEIYPVISLYNLVRNYVTQKPYSTKKIKLNFGIPTLADGWSKSKEYSNNAIILMRDNLYYLGIFNAKNKPDKKIIEGNTSENKGDYKKMIYNLLPGPNKMIPKVFLSSKTGVETYKPSAYILEGYKQNKHIKSSKDFDITFCHDLIDYFKNCIAIHPEWKNFGFDFSDTSTYEDISGFYREVELQGYKIDWTYISEKDIDLLQEKGQLYLFQIYNKDFSKKSTGNDNLHTMYLKNLFSEENLKDIVLKLNGEAEIFFRKSSIKNPIIHKKGSILVNRTYEAEEKDQFGNIQIVRKNIPENIYQELYKYFNDKSDKELSDEAAKLKNVVGHHEAATNIVKDYRYTYDKYFLHMPITINFKANKTGFINDRILQYIAKEKDLHVIGIDRGERNLIYVSVIDTCGNIVEQKSFNIVNGYDYQIKLKQQEGARQIARKEWKEIGKIKEIKEGYLSLVIHEISKMVIKYNAIIAMEDLSYGFKKGRFKVERQVYQKFETMLINKLNYLVFKDISITENGGLLKGYQLTYIPDKLKNVGHQCGCIFYVPAAYTSKIDPTTGFVNIFKFKDLTVDAKREFIKKFDSIRYDSEKNLFCFTFDYNNFITQNTVMSKSSWSVYTYGVRIKRRFVNGRFSNESDTIDITKDMEKTLEMTDINWRDGHDLRQDIIDYEIVQHIFEIFRLTVQMRNSLSELEDRDYDRLISPVLNENNIFYDSAKAGDALPKDADANGAYCIALKGLYEIKQITENWKEDGKFSRDKLKISNKDWFDFIQNKRYL

SEQ ID NO: 57 - DNA, 3789 bp, synthetic construct
  source 1..3789: mol_type = other DNA
atgaataacggtaccaataactttcaaaattttatcgggatctcctcgttgcaaaaaactcttcgtaatgctttaatcccgactgagacaacacagcagttcatcgttaaaaacggcatcattaaagaagatgagctgcgcggcgagaaccgtcagattttaaaggacatcatggacgactattaccgtgggttcatctcagaaacattaagcagcatcgatgatatcgactggacctcactgtttgagaagatggagattcaacttaagaatggagacaacaaagacactttaattaaggagcagacggaatatcgtaaagctatccataaaaaatttgcaaacgatgaccgtttcaaaaatatgttttccgcaaaattgattagcgacattttacctgaattcgtaatccataacaacaactattccgcatctgaaaaagaggagaagacccaagttatcaaacttttttcacgtttcgcgacatcttttaaagactactttaagaatcgtgcgaattgtttcagtgcagatgatatttcgtctagttcatgtcaccgtatcgtgaatgacaacgctgagattttcttttctaatgcgttggtgtatcgccgcatcgtaaagtccttgtcgaatgatgatatcaacaaaattagtggtgacatgaaagactccctgaaagaaatgtcattagaggagatttacagctacgaaaaatacggagagttcatcactcaggaaggtatctccttttacaacgatatttgcggcaaagttaatagtttcatgaatctgtattgtcagaagaataaggaaaacaagaatctgtacaagttacaaaagcttcataaacagatcttgtgcatcgccgacacgtcttatgaagtcccgtataaatttgaaagcgacgaagaagtatatcagagtgtgaatggattcttggacaatatctcatcaaaacacattgttgaacgtttgcgcaaaatcggcgacaactataacggatacaacttggataaaatttatatcgtatcaaaattttatgaatcagtatcccaaaagacttaccgtgattgggagactattaatacggcgttagaaatccattacaacaacattctgccgggtaacggtaaatcgaaagcggacaaagtgaagaaggcggttaagaacgatcttcagaagtctatcacggagattaatgagctggtttccaattacaagttgtgctcggatgataacatcaaagctgaaacctatatccatgaaatttctcatattcttaataacttcgaggcacaagaattaaaatataacccagaaattcatctggttgagagcgaacttaaagcttcagaattaaaaaatgttttggacgtaattatgaacgccttccattggtgcagcgtgtttatgacagaggagttagtagataaggataacaacttttatgcagaattggaagagatctatgatgagatctatccagtgaaatcactgtataacttagtccgtaattacgtcactcagaagccgtactcaactaaaaagatcaagttaaattttggaattccgacattggcggatggttggagtaagtctaaggaatactcaaataacgctattatcttaatgcgtgacaacctgtattacttgggtattttcaatgccaaaaataagcccgataaaaaaatcattgaagggaatacttcagaaaataagggagattacaaaaaaatgatttataaccttttgccaggcccaaacaaaatgatccccaaggtgtttttgagtagtaagacgggagtagaaacatataagccatcagcgtacattcttgaagggtacaaacaaaataaacacatcaagagcagcaaggactttgacattacattttgtcatgacttaatcgactactttaaaaattgcattgccattcaccctgagtggaaaaattttggtttcgacttcagtgatacctctacctatgaagatatctctggtttttatcgtgaggtagaacttcagggttacaagatcgattggacgtacatttccgagaaagacattgatcttttacaagagaagggtcagctttacttatttcagatctacaataaagacttttcgaaaaaatccacgggcaacgacaaccttcatacaatgtacttaaagaacctgttctctgaagaaaacttgaaagatatcgtgcttaaattgaatggcgaggccgagatttttttccgtaaaagctcgattaagaatcccatcatccacaagaaaggcagcattctggtaaatcgtacctatgaagcggaggaaaaggaccaatttggtaatattcagattgtccgtaagaacatccctgaaaatatctatcaagaattatataaatatttcaacgataagtcggacaaggaacttagcgatgaagccgcgaagttgaaaaatgttgttggtcaccacgaagcagcaacaaacattgtgaaagactatcgctacacttacgataagtactttttacatatgcctattacgattaactttaaggcaaataagacaggttttatcaacgaccgtatcctgcaatatattgcaaaagagaaggacctgcatgtcattgggattgatcgcggtgaacgcaatctgatttacgtgagtgttattgatacctgcggtaatattgttgagcaaaagtcttttaatatcgttaatggttacgactaccaaattaagcttaaacaacaggaaggtgcccgccagatcgcccgtaaggagtggaaggaaatcggaaaaattaaggaaatcaaagagggatatctgagcttggttattcatgaaatctcaaagatggttattaagtacaacgccatcatcgctatggaagacttatcgtatgggtttaaaaagggtcgtttcaaagttgagcgccaggtctaccaaaagtttgaaacgatgcttattaataaattaaactacttggttttcaaagatatctctattaccgagaatggaggtttactgaaaggataccagttaacgtatatccccgataagcttaaaaacgtgggccatcagtgtggctgtattttctatgtgcccgcggcatatacatcaaaaattgacccgacgacgggtttcgttaatatcttcaagttcaaagatctgacagttgatgcaaaacgcgaattcattaagaagttcgatagtattcgctatgactccgagaaaaatttgttttgcttcacttttgactacaataactttattactcagaatacagtcatgagtaaaagctcctggtcggtttacacgtacggggtacgcatcaaacgtcgttttgtgaatggtcgttttagtaatgagtcggatacaattgatattaccaaggatatggagaagactctggaaatgacagacatcaattggcgtgatggacatgatttgcgtcaggacattatcgactatgagattgtgcagcatattttcgaaatttttcgcctgacggtgcaaatgcgtaattccttaagcgaactggaagatcgcgactatgaccgcttaatttctcctgtgctgaatgagaacaacatcttctatgactcagcgaaagccggggacgctttgccaaaggatgcagatgctaacggtgcatattgtattgctctgaaaggcctttacgagatcaaacaaattactgaaaactggaaggaagatggaaagttttcccgtgataaattgaagatctctaataaggactggtttgactttatccaaaataaacgttattta

SEQ ID NO: 58 - protein, 1263 aa, synthetic construct
MNNGTNNFQNFIGISSLQKTLRNALIPTETTQQFIVKNGIIKEDELRGENRQILKDIMDDYYRGFISETLSSIDDIDWTSLFEKMEIQLKNGDNKDTLIKEQTEYRKAIHKKFANDDRFKNMFSAKLISDILPEFVIHNNNYSASEKEEKTQVIKLFSRFATSFKDYFKNRANCFSADDISSSSCHRIVNDNAEIFFSNALVYRRIVKSLSNDDINKISGDMKDSLKEMSLEEIYSYEKYGEFITQEGISFYNDICGKVNSFMNLYCQKNKENKNLYKLQKLHKQILCIADTSYEVPYKFESDEEVYQSVNGFLDNISSKHIVERLRKIGDNYNGYNLDKIYIVSKFYESVSQKTYRDWETINTALEIHYNNILPGNGKSKADKVKKAVKNDLQKSITEINELVSNYKLCSDDNIKAETYIHEISHILNNFEAQELKYNPEIHLVESELKASELKNVLDVIMNAFHWCSVFMTEELVDKDNNFYAELEEIYDEIYPVKSLYNLVRNYVTQKPYSTKKIKLNFGIPTLADGWSKSKEYSNNAIILMRDNLYYLGIFNAKNKPDKKIIEGNTSENKGDYKKMIYNLLPGPNKMIPKVFLSSKTGVETYKPSAYILEGYKQNKHIKSSKDFDITFCHDLIDYFKNCIAIHPEWKNFGFDFSDTSTYEDISGFYREVELQGYKIDWTYISEKDIDLLQEKGQLYLFQIYNKDFSKKSTGNDNLHTMYLKNLFSEENLKDIVLKLNGEAEIFFRKSSIKNPIIHKKGSILVNRTYEAEEKDQFGNIQIVRKNIPENIYQELYKYFNDKSDKELSDEAAKLKNVVGHHEAATNIVKDYRYTYDKYFLHMPITINFKANKTGFINDRILQYIAKEKDLHVIGIDRGERNLIYVSVIDTCGNIVEQKSFNIVNGYDYQIKLKQQEGARQIARKEWKEIGKIKEIKEGYLSLVIHEISKMVIKYNAIIAMEDLSYGFKKGRFKVERQVYQKFETMLINKLNYLVFKDISITENGGLLKGYQLTYIPDKLKNVGHQCGCIFYVPAAYTSKIDPTTGFVNIFKFKDLTVDAKREFIKKFDSIRYDSEKNLFCFTFDYNNFITQNTVMSKSSWSVYTYGVRIKRRFVNGRFSNESDTIDITKDMEKTLEMTDINWRDGHDLRQDIIDYEIVQHIFEIFRLTVQMRNSLSELEDRDYDRLISPVLNENNIFYDSAKAGDALPKDADANGAYCIALKGLYEIKQITENWKEDGKFSRDKLKISNKDWFDFIQNKRYL

SEQ ID NO: 59 - DNA, 3789 bp, synthetic construct
  source 1..3789: mol_type = other DNA
atgaataacggtaccaataactttcaaaattttatcgggatctcctcgttgcaaaaaactcttcgtaatgctttaatcccgactgagacaacacagcagttcatcgttaaaaacggcatcattaaagaagatgagctgcgcggcgagaaccgtcagattttaaaggacatcatggacgactattaccgtgggttcatctcagaaacattaagcagcatcgatgatatcgactggacctcactgtttgagaagatggagattcaacttaagaatggagacaacaaagacactttaattaaggagcagacggaatatcgtaaagctatccataaaaaatttgcaaacgatgaccgtttcaaaaatatgttttccgcaaaattgattagcgacattttacctgaattcgtaatccataacaacaactattccgcatctgaaaaagaggagaagacccaagttatcaaacttttttcacgtttcgcgacatcttttaaagactactttaagaatcgtgcgaattgtttcagtgcagatgatatttcgtctagttcatgtcaccgtatcgtgaatgacaacgctgagattttcttttctaatgcgttggtgtatcgccgcatcgtaaagtccttgtcgaatgatgatatcaacaaaattagtggtgacatgaaagactccctgaaagaaatgtcattagaggagatttacagctacgaaaaatacggagagttcatcactcaggaaggtatctccttttacaacgatatttgcggcaaagttaatagtttcatgaatctgtattgtcagaagaataaggaaaacaagaatctgtacaagttacaaaagcttcataaacagatcttgtgcatcgccgacacgtcttatgaagtcccgtataaatttgaaagcgacgaagaagtatatcagagtgtgaatggattcttggacaatatctcatcaaaacacattgttgaacgtttgcgcaaaatcggcgacaactataacggatacaacttggataaaatttatatcgtatcaaaattttatgaatcagtatcccaaaagacttaccgtgattgggagactattaatacggcgttagaaatccattacaacaacattctgccgggtaacggtaaatcgaaagcggacaaagtgaagaaggcggttaagaacgatcttcagaagtctatcacggagattaatgagctggtttccaattacaagttgtgctcggatgataacatcaaagctgaaacctatatccatgaaatttctcatattcttaataacttcgaggcacaagaattaaaatataacccagaaattcatctggttgagagcgaacttaaagcttcagaattaaaaaatgttttggacgtaattatgaacgccttccattggtgcagcgtgtttatgacagaggagttagtagataaggataacaacttttatgcagaattggaagagatctatgatgagatctatccagtgatttcactgtataacttagtccgtaattgggtcactcagaagccgtactcaactaaaaagatcaagttaaattttggaattccgacattggcggatggttggagtaagtctaaggaatactcaaataacgctattatcttaatgcgtgacaacctgtattacttgggtattttcaatgccaaaaataagcccgataaaaaaatcattgaagggaatacttcagaaaataagggagattacaaaaaaatgatttataaccttttgccaggcccaaacaaaatgatccccaaggtgtttttgagtagtaagacgggagtagaaacatataagccatcagcgtacattcttgaagggtacaaacaaaataaacacatcaagagcagcaaggactttgacattacattttgtcatgacttaatcgactactttaaaaattgcattgccattcaccctgagtggaaaaattttggtttcgacttcagtgatacctctacctatgaagatatctctggtttttatcgtgaggtagaacttcagggttacaagatcgattggacgtacatttccgagaaagacattgatcttttacaagagaagggtcagctttacttatttcagatctacaataaagacttttcgaaaaaatccacgggcaacgacaaccttcatacaatgtacttaaagaacctgttctctgaagaaaacttgaaagatatcgtgcttaaattgaatggcgaggccgagatttttttccgtaaaagctcgattaagaatcccatcatccacaagaaaggcagcattctggtaaatcgtacctatgaagcggaggaaaaggaccaatttggtaatattcagattgtccgtaagaacatccctgaaaatatctatcaagaattatataaatatttcaacgataagtcggacaaggaacttagcgatgaagccgcgaagttgaaaaatgttgttggtcaccacgaagcagcaacaaacattgtgaaagactatcgctacacttacgataagtactttttacatatgcctattacgattaactttaaggcaaataagacaggttttatcaacgaccgtatcctgcaatatattgcaaaagagaaggacctgcatgtcattgggattgatcgcggtgaacgcaatctgatttacgtgagtgttattgatacctgcggtaatattgttgagcaaaagtcttttaatatcgttaatggttacgactaccaaattaagcttaaacaacaggaaggtgcccgccagatcgcccgtaaggagtggaaggaaatcggaaaaattaaggaaatcaaagagggatatctgagcttggttattcatgaaatctcaaagatggttattaagtacaacgccatcatcgctatggaagacttatcgtatgggtttaaaaagggtcgtttcaaagttgagcgccaggtctaccaaaagtttgaaacgatgcttattaataaattaaactacttggttttcaaagatatctctattaccgagaatggaggtttactgaaaggataccagttaacgtatatccccgataagcttaaaaacgtgggccatcagtgtggctgtattttctatgtgcccgcggcatatacatcaaaaattgacccgacgacgggtttcgttaatatcttcaagttcaaagatctgacagttgatgcaaaacgcgaattcattaagaagttcgatagtattcgctatgactccgagaaaaatttgttttgcttcacttttgactacaataactttattactcagaatacagtcatgagtaaaagctcctggtcggtttacacgtacggggtacgcatcaaacgtcgttttgtgaatggtcgttttagtaatgagtcggatacaattgatattaccaaggatatggagaagactctggaaatgacagacatcaattggcgtgatggacatgatttgcgtcaggacattatcgactatgagattgtgcagcatattttcgaaatttttcgcctgacggtgcaaatgcgtaattccttaagcgaactggaagatcgcgactatgaccgcttaatttctcctgtgctgaatgagaacaacatcttctatgactcagcgaaagccggggacgctttgccaaaggatgcagatgctaacggtgcatattgtattgctctgaaaggcctttacgagatcaaacaaattactgaaaactggaaggaagatggaaagttttcccgtgataaattgaagatctctaataaggactggtttgactttatccaaaataaacgttattta

SEQ ID NO: 60 - protein, 1263 aa, synthetic construct
MNNGTNNFQNFIGISSLQKTLRNALIPTETTQQFIVKNGIIKEDELRGENRQILKDIMDDYYRGFISETLSSIDDIDWTSLFEKMEIQLKNGDNKDTLIKEQTEYRKAIHKKFANDDRFKNMFSAKLISDILPEFVIHNNNYSASEKEEKTQVIKLFSRFATSFKDYFKNRANCFSADDISSSSCHRIVNDNAEIFFSNALVYRRIVKSLSNDDINKISGDMKDSLKEMSLEEIYSYEKYGEFITQEGISFYNDICGKVNSFMNLYCQKNKENKNLYKLQKLHKQILCIADTSYEVPYKFESDEEVYQSVNGFLDNISSKHIVERLRKIGDNYNGYNLDKIYIVSKFYESVSQKTYRDWETINTALEIHYNNILPGNGKSKADKVKKAVKNDLQKSITEINELVSNYKLCSDDNIKAETYIHEISHILNNFEAQELKYNPEIHLVESELKASELKNVLDVIMNAFHWCSVFMTEELVDKDNNFYAELEEIYDEIYPVISLYNLVRNWVTQKPYSTKKIKLNFGIPTLADGWSKSKEYSNNAIILMRDNLYYLGIFNAKNKPDKKIIEGNTSENKGDYKKMIYNLLPGPNKMIPKVFLSSKTGVETYKPSAYILEGYKQNKHIKSSKDFDITFCHDLIDYFKNCIAIHPEWKNFGFDFSDTSTYEDISGFYREVELQGYKIDWTYISEKDIDLLQEKGQLYLFQIYNKDFSKKSTGNDNLHTMYLKNLFSEENLKDIVLKLNGEAEIFFRKSSIKNPIIHKKGSILVNRTYEAEEKDQFGNIQIVRKNIPENIYQELYKYFNDKSDKELSDEAAKLKNVVGHHEAATNIVKDYRYTYDKYFLHMPITINFKANKTGFINDRILQYIAKEKDLHVIGIDRGERNLIYVSVIDTCGNIVEQKSFNIVNGYDYQIKLKQQEGARQIARKEWKEIGKIKEIKEGYLSLVIHEISKMVIKYNAIIAMEDLSYGFKKGRFKVERQVYQKFETMLINKLNYLVFKDISITENGGLLKGYQLTYIPDKLKNVGHQCGCIFYVPAAYTSKIDPTTGFVNIFKFKDLTVDAKREFIKKFDSIRYDSEKNLFCFTFDYNNFITQNTVMSKSSWSVYTYGVRIKRRFVNGRFSNESDTIDITKDMEKTLEMTDINWRDGHDLRQDIIDYEIVQHIFEIFRLTVQMRNSLSELEDRDYDRLISPVLNENNIFYDSAKAGDALPKDADANGAYCIALKGLYEIKQITENWKEDGKFSRDKLKISNKDWFDFIQNKRYL

SEQ ID NO: 61 - DNA, 3789 bp, synthetic construct
  source 1..3789: mol_type = other DNA
atgaataacggtaccaataactttcaaaattttatcgggatctcctcgttgcaaaaaactcttcgtaatgctttaatcccgactgagacaacacagcagttcatcgttaaaaacggcatcattaaagaagatgagctgcgcggcgagaaccgtcagattttaaaggacatcatggacgactattaccgtgggttcatctcagaaacattaagcagcatcgatgatatcgactggacctcactgtttgagaagatggagattcaacttaagaatggagacaacaaagacactttaattaaggagcagacggaatatcgtaaagctatccataaaaaatttgcaaacgatgaccgtttcaaaaatatgttttccgcaaaattgattagcgacattttacctgaattcgtaatccataacaacaactattccgcatctgaaaaagaggagaagacccaagttatcaaacttttttcacgtttcgcgacatcttttaaagactactttaagaatcgtgcgaattgtttcagtgcagatgatatttcgtctagttcatgtcaccgtatcgtgaatgacaacgctgagattttcttttctaatgcgttggtgtatcgccgcatcgtaaagtccttgtcgaatgatgatatcaacaaaattagtggtgacatgaaagactccctgaaagaaatgtcattagaggagatttacagctacgaaaaatacggagagttcatcactcaggaaggtatctccttttacaacgatatttgcggcaaagttaatagtttcatgaatctgtattgtcagaagaataaggaaaacaagaatctgtacaagttacaaaagcttcataaacagatcttgtgcatcgccgacacgtcttatgaagtcccgtataaatttgaaagcgacgaagaagtatatcagagtgtgaatggattcttggacaatatctcatcaaaacacattgttgaacgtttgcgcaaaatcggcgacaactataacggatacaacttggataaaatttatatcgtatcaaaattttatgaatcagtatcccaaaagacttaccgtgattgggagactattaatacggcgttagaaatccattacaacaacattctgccgggtaacggtaaatcgaaagcggacaaagtgaagaaggcggttaagaacgatcttcagaagtctatcacggagattaatgagctggtttccaattacaagttgtgctcggatgataacatcaaagctgaaacctatatccatgaaatttctcatattcttaataacttcgaggcacaagaattaaaatataacccagaaattcatctggttgagagcgaacttaaagcttcagaattaaaaaatgttttggacgtaattatgaacgccttccattggtgcagcgtgtttatgacagaggagttagtagataaggataacaacttttatgcagaattggaagagatctatgatgagatctatccagtgatttcactgtataacttagtccgtaatagcgtcactcagaagccgtactcaactaaaaagatcaagttaaattttggaattccgacattggcggatggttggagtaagtctaaggaatactcaaataacgctattatcttaatgcgtgacaacctgtattacttgggtattttcaatgccaaaaataagcccgataaaaaaatcattgaagggaatacttcagaaaataagggagattacaaaaaaatgatttataaccttttgccaggcccaaacaaaatgatccccaaggtgtttttgagtagtaagacgggagtagaaacatataagccatcagcgtacattcttgaagggtacaaacaaaataaacacatcaagagcagcaaggactttgacattacattttgtcatgacttaatcgactactttaaaaattgcattgccattcaccctgagtggaaaaattttggtttcgacttcagtgatacctctacctatgaagatatctctggtttttatcgtgaggtagaacttcagggttacaagatcgattggacgtacatttccgagaaagacattgatcttttacaagagaagggtcagctttacttatttcagatctacaataaagacttttcgaaaaaatccacgggcaacgacaaccttcatacaatgtacttaaagaacctgttctctgaagaaaacttgaaagatatcgtgcttaaattgaatggcgaggccgagatttttttccgtaaaagctcgattaagaatcccatcatccacaagaaaggcagcattctggtaaatcgtacctatgaagcggaggaaaaggaccaatttggtaatattcagattgtccgtaagaacatccctgaaaatatctatcaagaattatataaatatttcaacgataagtcggacaaggaacttagcgatgaagccgcgaagttgaaaaatgttgttggtcaccacgaagcagcaacaaacattgtgaaagactatcgctacacttacgataagtactttttacatatgcctattacgattaactttaaggcaaataagacaggttttatcaacgaccgtatcctgcaatatattgcaaaagagaaggacctgcatgtcattgggattgatcgcggtgaacgcaatctgatttacgtgagtgttattgatacctgcggtaatattgttgagcaaaagtcttttaatatcgttaatggttacgactaccaaattaagcttaaacaacaggaaggtgcccgccagatcgcccgtaaggagtggaaggaaatcggaaaaattaaggaaatcaaagagggatatctgagcttggttattcatgaaatctcaaagatggttattaagtacaacgccatcatcgctatggaagacttatcgtatgggtttaaaaagggtcgtttcaaagttgagcgccaggtctaccaaaagtttgaaacgatgcttattaataaattaaactacttggttttcaaagatatctctattaccgagaatggaggtttactgaaaggataccagttaacgtatatccccgataagcttaaaaacgtgggccatcagtgtggctgtattttctatgtgcccgcggcatatacatcaaaaattgacccgacgacgggtttcgttaatatcttcaagttcaaagatctgacagttgatgcaaaacgcgaattcattaagaagttcgatagtattcgctatgactccgagaaaaatttgttttgcttcacttttgactacaataactttattactcagaatacagtcatgagtaaaagctcctggtcggtttacacgtacggggtacgcatcaaacgtcgttttgtgaatggtcgttttagtaatgagtcggatacaattgatattaccaaggatatggagaagactctggaaatgacagacatcaattggcgtgatggacatgatttgcgtcaggacattatcgactatgagattgtgcagcatattttcgaaatttttcgcctgacggtgcaaatgcgtaattccttaagcgaactggaagatcgcgactatgaccgcttaatttctcctgtgctgaatgagaacaacatcttctatgactcagcgaaagccggggacgctttgccaaaggatgcagatgctaacggtgcatattgtattgctctgaaaggcctttacgagatcaaacaaattactgaaaactggaaggaagatggaaagttttcccgtgataaattgaagatctctaataaggactggtttgactttatccaaaataaacgttattta

SEQ ID NO: 62 - protein, 1263 aa, synthetic construct
MNNGTNNFQNFIGISSLQKTLRNALIPTETTQQFIVKNGIIKEDELRGENRQILKDIMDDYYRGFISETLSSIDDIDWTSLFEKMEIQLKNGDNKDTLIKEQTEYRKAIHKKFANDDRFKNMFSAKLISDILPEFVIHNNNYSASEKEEKTQVIKLFSRFATSFKDYFKNRANCFSADDISSSSCHRIVNDNAEIFFSNALVYRRIVKSLSNDDINKISGDMKDSLKEMSLEEIYSYEKYGEFITQEGISFYNDICGKVNSFMNLYCQKNKENKNLYKLQKLHKQILCIADTSYEVPYKFESDEEVYQSVNGFLDNISSKHIVERLRKIGDNYNGYNLDKIYIVSKFYESVSQKTYRDWETINTALEIHYNNILPGNGKSKADKVKKAVKNDLQKSITEINELVSNYKLCSDDNIKAETYIHEISHILNNFEAQELKYNPEIHLVESELKASELKNVLDVIMNAFHWCSVFMTEELVDKDNNFYAELEEIYDEIYPVISLYNLVRNSVTQKPYSTKKIKLNFGIPTLADGWSKSKEYSNNAIILMRDNLYYLGIFNAKNKPDKKIIEGNTSENKGDYKKMIYNLLPGPNKMIPKVFLSSKTGVETYKPSAYILEGYKQNKHIKSSKDFDITFCHDLIDYFKNCIAIHPEWKNFGFDFSDTSTYEDISGFYREVELQGYKIDWTYISEKDIDLLQEKGQLYLFQIYNKDFSKKSTGNDNLHTMYLKNLFSEENLKDIVLKLNGEAEIFFRKSSIKNPIIHKKGSILVNRTYEAEEKDQFGNIQIVRKNIPENIYQELYKYFNDKSDKELSDEAAKLKNVVGHHEAATNIVKDYRYTYDKYFLHMPITINFKANKTGFINDRILQYIAKEKDLHVIGIDRGERNLIYVSVIDTCGNIVEQKSFNIVNGYDYQIKLKQQEGARQIARKEWKEIGKIKEIKEGYLSLVIHEISKMVIKYNAIIAMEDLSYGFKKGRFKVERQVYQKFETMLINKLNYLVFKDISITENGGLLKGYQLTYIPDKLKNVGHQCGCIFYVPAAYTSKIDPTTGFVNIFKFKDLTVDAKREFIKKFDSIRYDSEKNLFCFTFDYNNFITQNTVMSKSSWSVYTYGVRIKRRFVNGRFSNESDTIDITKDMEKTLEMTDINWRDGHDLRQDIIDYEIVQHIFEIFRLTVQMRNSLSELEDRDYDRLISPVLNENNIFYDSAKAGDALPKDADANGAYCIALKGLYEIKQITENWKEDGKFSRDKLKISNKDWFDFIQNKRYL

SEQ ID NO: 63 - DNA, 3789 bp, synthetic construct
  source 1..3789: mol_type = other DNA
atgaataacggtaccaataactttcaaaattttatcgggatctcctcgttgcaaaaaactcttcgtaatgctttaatcccgactgagacaacacagcagttcatcgttaaaaacggcatcattaaagaagatgagctgcgcggcgagaaccgtcagattttaaaggacatcatggacgactattaccgtgggttcatctcagaaacattaagcagcatcgatgatatcgactggacctcactgtttgagaagatggagattcaacttaagaatggagacaacaaagacactttaattaaggagcagacggaatatcgtaaagctatccataaaaaatttgcaaacgatgaccgtttcaaaaatatgttttccgcaaaattgattagcgacattttacctgaattcgtaatccataacaacaactattccgcatctgaaaaagaggagaagacccaagttatcaaacttttttcacgtttcgcgacatcttttaaagactactttaagaatcgtgcgaattgtttcagtgcagatgatatttcgtctagttcatgtcaccgtatcgtgaatgacaacgctgagattttcttttctaatgcgttggtgtatcgccgcatcgtaaagtccttgtcgaatgatgatatcaacaaaattagtggtgacatgaaagactccctgaaagaaatgtcattagaggagatttacagctacgaaaaatacggagagttcatcactcaggaaggtatctccttttacaacgatatttgcggcaaagttaatagtttcatgaatctgtattgtcagaagaataaggaaaacaagaatctgtacaagttacaaaagcttcataaacagatcttgtgcatcgccgacacgtcttatgaagtcccgtataaatttgaaagcgacgaagaagtatatcagagtgtgaatggattcttggacaatatctcatcaaaacacattgttgaacgtttgcgcaaaatcggcgacaactataacggatacaacttggataaaatttatatcgtatcaaaattttatgaatcagtatcccaaaagacttaccgtgattgggagactattaatacggcgttagaaatccattacaacaacattctgccgggtaacggtaaatcgaaagcggacaaagtgaagaaggcggttaagaacgatcttcagaagtctatcacggagattaatgagctggtttccaattacaagttgtgctcggatgataacatcaaagctgaaacctatatccatgaaatttctcatattcttaataacttcgaggcacaagaattaaaatataacccagaaattcatctggttgagagcgaacttaaagcttcagaattaaaaaatgttttggacgtaattatgaacgccttccattggtgcagcgtgtttatgacagaggagttagtagataaggataacaacttttatgcagaattggaagagatctatgatgagatctatccagtgatttcactgtataacttagtccgtaatcgtgtcactcagaagccgtactcaactaaaaagatcaagttaaattttggaattccgacattggcggatggttggagtaagtctaaggaatactcaaataacgctattatcttaatgcgtgacaacctgtattacttgggtattttcaatgccaaaaataagcccgataaaaaaatcattgaagggaatacttcagaaaataagggagattacaaaaaaatgatttataaccttttgccaggcccaaacaaaatgatccccaaggtgtttttgagtagtaagacgggagtagaaacatataagccatcagcgtacattcttgaagggtacaaacaaaataaacacatcaagagcagcaaggactttgacattacattttgtcatgacttaatcgactactttaaaaattgcattgccattcaccctgagtggaaaaattttggtttcgacttcagtgatacctctacctatgaagatatctctggtttttatcgtgaggtagaacttcagggttacaagatcgattggacgtacatttccgagaaagacattgatcttttacaagagaagggtcagctttacttatttcagatctacaataaagacttttcgaaaaaatccacgggcaacgacaaccttcatacaatgtacttaaagaacctgttctctgaagaaaacttgaaagatatcgtgcttaaattgaatggcgaggccgagatttttttccgtaaaagctcgattaagaatcccatcatccacaagaaaggcagcattctggtaaatcgtacctatgaagcggaggaaaaggaccaatttggtaatattcagattgtccgtaagaacatccctgaaaatatctatcaagaattatataaatatttcaacgataagtcggacaaggaacttagcgatgaagccgcgaagttgaaaaatgttgttggtcaccacgaagcagcaacaaacattgtgaaagactatcgctacacttacgataagtactttttacatatgcctattacgattaactttaaggcaaataagacaggttttatcaacgaccgtatcctgcaatatattgcaaaagagaaggacctgcatgtcattgggattgatcgcggtgaacgcaatctgatttacgtgagtgttattgatacctgcggtaatattgttgagcaaaagtcttttaatatcgttaatggttacgactaccaaattaagcttaaacaacaggaaggtgcccgccagatcgcccgtaaggagtggaaggaaatcggaaaaattaaggaaatcaaagagggatatctgagcttggttattcatgaaatctcaaagatggttattaagtacaacgccatcatcgctatggaagacttatcgtatgggtttaaaaagggtcgtttcaaagttgagcgccaggtctaccaaaagtttgaaacgatgcttattaataaattaaactacttggttttcaaagatatctctattaccgagaatggaggtttactgaaaggataccagttaacgtatatccccgataagcttaaaaacgtgggccatcagtgtggctgtattttctatgtgcccgcggcatatacatcaaaaattgacccgacgacgggtttcgttaatatcttcaagttcaaagatctgacagttgatgcaaaacgcgaattcattaagaagttcgatagtattcgctatgactccgagaaaaatttgttttgcttcacttttgactacaataactttattactcagaatacagtcatgagtaaaagctcctggtcggtttacacgtacggggtacgcatcaaacgtcgttttgtgaatggtcgttttagtaatgagtcggatacaattgatattaccaaggatatggagaagactctggaaatgacagacatcaattggcgtgatggacatgatttgcgtcaggacattatcgactatgagattgtgcagcatattttcgaaatttttcgcctgacggtgcaaatgcgtaattccttaagcgaactggaagatcgcgactatgaccgcttaatttctcctgtgctgaatgagaacaacatcttctatgactcagcgaaagccggggacgctttgccaaaggatgcagatgctaacggtgcatattgtattgctctgaaaggcctttacgagatcaaacaaattactgaaaactggaaggaagatggaaagttttcccgtgataaattgaagatctctaataaggactggtttgactttatccaaaataaacgttattta

SEQ ID NO: 64 - protein, 1263 aa, synthetic construct
MNNGTNNFQNFIGISSLQKTLRNALIPTETTQQFIVKNGIIKEDELRGENRQILKDIMDDYYRGFISETLSSIDDIDWTSLFEKMEIQLKNGDNKDTLIKEQTEYRKAIHKKFANDDRFKNMFSAKLISDILPEFVIHNNNYSASEKEEKTQVIKLFSRFATSFKDYFKNRANCFSADDISSSSCHRIVNDNAEIFFSNALVYRRIVKSLSNDDINKISGDMKDSLKEMSLEEIYSYEKYGEFITQEGISFYNDICGKVNSFMNLYCQKNKENKNLYKLQKLHKQILCIADTSYEVPYKFESDEEVYQSVNGFLDNISSKHIVERLRKIGDNYNGYNLDKIYIVSKFYESVSQKTYRDWETINTALEIHYNNILPGNGKSKADKVKKAVKNDLQKSITEINELVSNYKLCSDDNIKAETYIHEISHILNNFEAQELKYNPEIHLVESELKASELKNVLDVIMNAFHWCSVFMTEELVDKDNNFYAELEEIYDEIYPVISLYNLVRNRVTQKPYSTKKIKLNFGIPTLADGWSKSKEYSNNAIILMRDNLYYLGIFNAKNKPDKKIIEGNTSENKGDYKKMIYNLLPGPNKMIPKVFLSSKTGVETYKPSAYILEGYKQNKHIKSSKDFDITFCHDLIDYFKNCIAIHPEWKNFGFDFSDTSTYEDISGFYREVELQGYKIDWTYISEKDIDLLQEKGQLYLFQIYNKDFSKKSTGNDNLHTMYLKNLFSEENLKDIVLKLNGEAEIFFRKSSIKNPIIHKKGSILVNRTYEAEEKDQFGNIQIVRKNIPENIYQELYKYFNDKSDKELSDEAAKLKNVVGHHEAATNIVKDYRYTYDKYFLHMPITINFKANKTGFINDRILQYIAKEKDLHVIGIDRGERNLIYVSVIDTCGNIVEQKSFNIVNGYDYQIKLKQQEGARQIARKEWKEIGKIKEIKEGYLSLVIHEISKMVIKYNAIIAMEDLSYGFKKGRFKVERQVYQKFETMLINKLNYLVFKDISITENGGLLKGYQLTYIPDKLKNVGHQCGCIFYVPAAYTSKIDPTTGFVNIFKFKDLTVDAKREFIKKFDSIRYDSEKNLFCFTFDYNNFITQNTVMSKSSWSVYTYGVRIKRRFVNGRFSNESDTIDITKDMEKTLEMTDINWRDGHDLRQDIIDYEIVQHIFEIFRLTVQMRNSLSELEDRDYDRLISPVLNENNIFYDSAKAGDALPKDADANGAYCIALKGLYEIKQITENWKEDGKFSRDKLKISNKDWFDFIQNKRYL

SEQ ID NO: 65 - DNA, 3789 bp, synthetic construct
  source 1..3789: mol_type = other DNA
atgaataacggtaccaataactttcaaaattttatcgggatctcctcgttgcaaaaaactcttcgtaatgctttaatcccgactgagacaacacagcagttcatcgttaaaaacggcatcattaaagaagatgagctgcgcggcgagaaccgtcagattttaaaggacatcatggacgactattaccgtgggttcatctcagaaacattaagcagcatcgatgatatcgactggacctcactgtttgagaagatggagattcaacttaagaatggagacaacaaagacactttaattaaggagcagacggaatatcgtaaagctatccataaaaaatttgcaaacgatgaccgtttcaaaaatatgttttccgcaaaattgattagcgacattttacctgaattcgtaatccataacaacaactattccgcatctgaaaaagaggagaagacccaagttatcaaacttttttcacgtttcgcgacatcttttaaagactactttaagaatcgtgcgaattgtttcagtgcagatgatatttcgtctagttcatgtcaccgtatcgtgaatgacaacgctgagattttcttttctaatgcgttggtgtatcgccgcatcgtaaagtccttgtcgaatgatgatatcaacaaaattagtggtgacatgaaagactccctgaaagaaatgtcattagaggagatttacagctacgaaaaatacggagagttcatcactcaggaaggtatctccttttacaacgatatttgcggcaaagttaatagtttcatgaatctgtattgtcagaagaataaggaaaacaagaatctgtacaagttacaaaagcttcataaacagatcttgtgcatcgccgacacgtcttatgaagtcccgtataaatttgaaagcgacgaagaagtatatcagagtgtgaatggattcttggacaatatctcatcaaaacacattgttgaacgtttgcgcaaaatcggcgacaactataacggatacaacttggataaaatttatatcgtatcaaaattttatgaatcagtatcccaaaagacttaccgtgattgggagactattaatacggcgttagaaatccattacaacaacattctgccgggtaacggtaaatcgaaagcggacaaagtgaagaaggcggttaagaacgatcttcagaagtctatcacggagattaatgagctggtttccaattacaagttgtgctcggatgataacatcaaagctgaaacctatatccatgaaatttctcatattcttaataacttcgaggcacaagaattaaaatataacccagaaattcatctggttgagagcgaacttaaagcttcagaattaaaaaatgttttggacgtaattatgaacgccttccattggtgcagcgtgtttatgacagaggagttagtagataaggataacaacttttatgcagaattggaagagatctatgatgagatctatccagtgatttcactgtataacttagtccgtaattacgtcacttataagccgtactcaactaaaaagatcaagttaaattttggaattccgacattggcggatggttggagtaagtctaaggaatactcaaataacgctattatcttaatgcgtgacaacctgtattacttgggtattttcaatgccaaaaataagcccgataaaaaaatcattgaagggaatacttcagaaaataagggagattacaaaaaaatgatttataaccttttgccaggcccaaacaaaatgatccccaaggtgtttttgagtagtaagacgggagtagaaacatataagccatcagcgtacattcttgaagggtacaaacaaaataaacacatcaagagcagcaaggactttgacattacattttgtcatgacttaatcgactactttaaaaattgcattgccattcaccctgagtggaaaaattttggtttcgacttcagtgatacctctacctatgaagatatctctggtttttatcgtgaggtagaacttcagggttacaagatcgattggacgtacatttccgagaaagacattgatcttttacaagagaagggtcagctttacttatttcagatctacaataaagacttttcgaaaaaatccacgggcaacgacaaccttcatacaatgtacttaaagaacctgttctctgaagaaaacttgaaagatatcgtgcttaaattgaatggcgaggccgagatttttttccgtaaaagctcgattaagaatcccatcatccacaagaaaggcagcattctggtaaatcgtacctatgaagcggaggaaaaggaccaatttggtaatattcagattgtccgtaagaacatccctgaaaatatctatcaagaattatataaatatttcaacgataagtcggacaaggaacttagcgatgaagccgcgaagttgaaaaatgttgttggtcaccacgaagcagcaacaaacattgtgaaagactatcgctacacttacgataagtactttttacatatgcctattacgattaactttaaggcaaataagacaggttttatcaacgaccgtatcctgcaatatattgcaaaagagaaggacctgcatgtcattgggattgatcgcggtgaacgcaatctgatttacgtgagtgttattgatacctgcggtaatattgttgagcaaaagtcttttaatatcgttaatggttacgactaccaaattaagcttaaacaacaggaaggtgcccgccagatcgcccgtaaggagtggaaggaaatcggaaaaattaaggaaatcaaagagggatatctgagcttggttattcatgaaatctcaaagatggttattaagtacaacgccatcatcgctatggaagacttatcgtatgggtttaaaaagggtcgtttcaaagttgagcgccaggtctaccaaaagtttgaaacgatgcttattaataaattaaactacttggttttcaaagatatctctattaccgagaatggaggtttactgaaaggataccagttaacgtatatccccgataagcttaaaaacgtgggccatcagtgtggctgtattttctatgtgcccgcggcatatacatcaaaaattgacccgacgacgggtttcgttaatatcttcaagttcaaagatctgacagttgatgcaaaacgcgaattcattaagaagttcgatagtattcgctatgactccgagaaaaatttgttttgcttcacttttgactacaataactttattactcagaatacagtcatgagtaaaagctcctggtcggtttacacgtacggggtacgcatcaaacgtcgttttgtgaatggtcgttttagtaatgagtcggatacaattgatattaccaaggatatggagaagactctggaaatgacagacatcaattggcgtgatggacatgatttgcgtcaggacattatcgactatgagattgtgcagcatattttcgaaatttttcgcctgacggtgcaaatgcgtaattccttaagcgaactggaagatcgcgactatgaccgcttaatttctcctgtgctgaatgagaacaacatcttctatgactcagcgaaagccggggacgctttgccaaaggatgcagatgctaacggtgcatattgtattgctctgaaaggcctttacgagatcaaacaaattactgaaaactggaaggaagatggaaagttttcccgtgataaattgaagatctctaataaggactggtttgactttatccaaaataaacgttattta

SEQ ID NO: 66 - protein, 1263 aa, synthetic construct
MNNGTNNFQNFIGISSLQKTLRNALIPTETTQQFIVKNGIIKEDELRGENRQILKDIMDDYYRGFISETLSSIDDIDWTSLFEKMEIQLKNGDNKDTLIKEQTEYRKAIHKKFANDDRFKNMFSAKLISDILPEFVIHNNNYSASEKEEKTQVIKLFSRFATSFKDYFKNRANCFSADDISSSSCHRIVNDNAEIFFSNALVYRRIVKSLSNDDINKISGDMKDSLKEMSLEEIYSYEKYGEFITQEGISFYNDICGKVNSFMNLYCQKNKENKNLYKLQKLHKQILCIADTSYEVPYKFESDEEVYQSVNGFLDNISSKHIVERLRKIGDNYNGYNLDKIYIVSKFYESVSQKTYRDWETINTALEIHYNNILPGNGKSKADKVKKAVKNDLKPYSTKKIKLNFGIPTLADGWSKSKEYSNNAIILMRDNLYYLGIFNAKNKPDKKIIEGNTSENKGDYKKMIYNLLPGPNKMIPKVFLSSKTGVETYKPSAYILEGYKQNKHIKSSKDFDITFCHDLIDYFKNCIAIHPEWKNFGFDFSDTSTYEDISGFYREVELQGYKIDWTYISEKDIDLLQEKGQLYLFQIYNKDFSKKSTGNDNLHTMYLKNLFSEENLKDIVLKLNGEAEIFFRKSSIKNPIIHKKGSILVNRTYEAEEKDQFGNIQIVRKNIPENIYQELYKYFNDKSDKELSDEAAKLKNVVGHHEAATNIVKDYRYTYDKYFLHMPITINFKANKTGFINDRILQYIAKEKDLHVIGIDRGERNLIYVSVIDTCGNIVEQKSFNIVNGYDYQIKLKQQEGARQIARKEWKEIGKIKEIKEGYLSLVIHEISKMVIKYNAIIAMEDLSYGFKKGRFKVERQVYQKFETMLINKLNYLVFKDISITENGGLLKGYQLTYIPDKLKNVGHQCGCIFYVPAAYTSKIDPTTGFVNIFKFKDLTVDAKREFIKKFDSIRYDSEKNLFCFTFDYNNFITQNTVMSKSSWSVYTYGVRIKRRFVNGRFSNESDTIDITKDMEKTLEMTDINWRDGHDLRQDIIDYEIVQHIFEIFRLTVQMRNSLSELEDRDYDRLISPVLNENNIFYDSAKAGDALPKDADANGAYCIALKGLYEIKQITENWKEDGKFSRDKLKISNKDWFDFIQNKRYLQKSITEINELVSNYKLCSDDNIKAETYIHEISHILNNFEAQELKYNPEIHLVESELKASELKNVLDVIMNAFHWCSVFMTEELVDKDNNFYAELEEIYDEIYPVISLYNLVRNYVTY

SEQ ID NO: 67 - DNA, 3789 bp, synthetic construct
  source 1..3789: mol_type = other DNA
atgaataacggtaccaataactttcaaaattttatcgggatctcctcgttgcaaaaaactcttcgtaatgctttaatcccgactgagacaacacagcagttcatcgttaaaaacggcatcattaaagaagatgagctgcgcggcgagaaccgtcagattttaaaggacatcatggacgactattaccgtgggttcatctcagaaacattaagcagcatcgatgatatcgactggacctcactgtttgagaagatggagattcaacttaagaatggagacaacaaagacactttaattaaggagcagacggaatatcgtaaagctatccataaaaaatttgcaaacgatgaccgtttcaaaaatatgttttccgcaaaattgattagcgacattttacctgaattcgtaatccataacaacaactattccgcatctgaaaaagaggagaagacccaagttatcaaacttttttcacgtttcgcgacatcttttaaagactactttaagaatcgtgcgaattgtttcagtgcagatgatatttcgtctagttcatgtcaccgtatcgtgaatgacaacgctgagattttcttttctaatgcgttggtgtatcgccgcatcgtaaagtccttgtcgaatgatgatatcaacaaaattagtggtgacatgaaagactccctgaaagaaatgtcattagaggagatttacagctacgaaaaatacggagagttcatcactcaggaaggtatctccttttacaacgatatttgcggcaaagttaatagtttcatgaatctgtattgtcagaagaataaggaaaacaagaatctgtacaagttacaaaagcttcataaacagatcttgtgcatcgccgacacgtcttatgaagtcccgtataaatttgaaagcgacgaagaagtatatcagagtgtgaatggattcttggacaatatctcatcaaaacacattgttgaacgtttgcgcaaaatcggcgacaactataacggatacaacttggataaaatttatatcgtatcaaaattttatgaatcagtatcccaaaagacttaccgtgattgggagactattaatacggcgttagaaatccattacaacaacattctgccgggtaacggtaaatcgaaagcggacaaagtgaagaaggcggttaagaacgatcttcagaagtctatcacggagattaatgagctggtttccaattacaagttgtgctcggatgataacatcaaagctgaaacctatatccatgaaatttctcatattcttaataacttcgaggcacaagaattaaaatataacccagaaattcatctggttgagagcgaacttaaagcttcagaattaaaaaatgttttggacgtaattatgaacgccttccattggtgcagcgtgtttatgacagaggagttagtagataaggataacaacttttatgcagaattggaagagatctatgatgagatctatccagtgatttcactgtataacttagtccgtaattacgtcactgtgaagccgtactcaactaaaaagatcaagttaaattttggaattccgacattggcggatggttggagtaagtctaaggaatactcaaataacgctattatcttaatgcgtgacaacctgtattacttgggtattttcaatgccaaaaataagcccgataaaaaaatcattgaagggaatacttcagaaaataagggagattacaaaaaaatgatttataaccttttgccaggcccaaacaaaatgatccccaaggtgtttttgagtagtaagacgggagtagaaacatataagccatcagcgtacattcttgaagggtacaaacaaaataaacacatcaagagcagcaaggactttgacattacattttgtcatgacttaatcgactactttaaaaattgcattgccattcaccctgagtggaaaaattttggtttcgacttcagtgatacctctacctatgaagatatctctggtttttatcgtgaggtagaacttcagggttacaagatcgattggacgtacatttccgagaaagacattgatcttttacaagagaagggtcagctttacttatttcagatctacaataaagacttttcgaaaaaatccacgggcaacgacaaccttcatacaatgtacttaaagaacctgttctctgaagaaaacttgaaagatatcgtgcttaaattgaatggcgaggccgagatttttttccgtaaaagctcgattaagaatcccatcatccacaagaaaggcagcattctggtaaatcgtacctatgaagcggaggaaaaggaccaatttggtaatattcagattgtccgtaagaacatccctgaaaatatctatcaagaattatataaatatttcaacgataagtcggacaaggaacttagcgatgaagccgcgaagttgaaaaatgttgttggtcaccacgaagcagcaacaaacattgtgaaagactatcgctacacttacgataagtactttttacatatgcctattacgattaactttaaggcaaataagacaggttttatcaacgaccgtatcctgcaatatattgcaaaagagaaggacctgcatgtcattgggattgatcgcggtgaacgcaatctgatttacgtgagtgttattgatacctgcggtaatattgttgagcaaaagtcttttaatatcgttaatggttacgactaccaaattaagcttaaacaacaggaaggtgcccgccagatcgcccgtaaggagtggaaggaaatcggaaaaattaaggaaatcaaagagggatatctgagcttggttattcatgaaatctcaaagatggttattaagtacaacgccatcatcgctatggaagacttatcgtatgggtttaaaaagggtcgtttcaaagttgagcgccaggtctaccaaaagtttgaaacgatgcttattaataaattaaactacttggttttcaaagatatctctattaccgagaatggaggtttactgaaaggataccagttaacgtatatccccgataagcttaaaaacgtgggccatcagtgtggctgtattttctatgtgcccgcggcatatacatcaaaaattgacccgacgacgggtttcgttaatatcttcaagttcaaagatctgacagttgatgcaaaacgcgaattcattaagaagttcgatagtattcgctatgactccgagaaaaatttgttttgcttcacttttgactacaataactttattactcagaatacagtcatgagtaaaagctcctggtcggtttacacgtacggggtacgcatcaaacgtcgttttgtgaatggtcgttttagtaatgagtcggatacaattgatattaccaaggatatggagaagactctggaaatgacagacatcaattggcgtgatggacatgatttgcgtcaggacattatcgactatgagattgtgcagcatattttcgaaatttttcgcctgacggtgcaaatgcgtaattccttaagcgaactggaagatcgcgactatgaccgcttaatttctcctgtgctgaatgagaacaacatcttctatgactcagcgaaagccggggacgctttgccaaaggatgcagatgctaacggtgcatattgtattgctctgaaaggcctttacgagatcaaacaaattactgaaaactggaaggaagatggaaagttttcccgtgataaattgaagatctctaataaggactggtttgactttatccaaaataaacgttattta

SEQ ID NO: 68 - protein, 1263 aa, synthetic construct
MNNGTNNFQNFIGISSLQKTLRNALIPTETTQQFIVKNGIIKEDELRGENRQILKDIMDDYYRGFISETLSSIDDIDWTSLFEKMEIQLKNGDNKDTLIKEQTEYRKAIHKKFANDDRFKNMFSAKLISDILPEFVIHNNNYSASEKEEKTQVIKLFSRFATSFKDYFKNRANCFSADDISSSSCHRIVNDNAEIFFSNALVYRRIVKSLSNDDINKISGDMKDSLKEMSLEEIYSYEKYGEFITQEGISFYNDICGKVNSFMNLYCQKNKENKNLYKLQKLHKQILCIADTSYEVPYKFESDEEVYQSVNGFLDNISSKHIVERLRKIGDNYNGYNLDKIYIVSKFYESVSQKTYRDWETINTALEIHYNNILPGNGKSKADKVKKAVKNDLQKSITEINELVSNYKLCSDDNIKAETYIHEISHILNNFEAQELKYNPEIHLVESELKASELKNVLDVIMNAFHWCSVFMTEELVDKDNNFYAELEEIYDEIYPVISLYNLVRNYVTVKPYSTKKIKLNFGIPTLADGWSKSKEYSNNAIILMRDNLYYLGIFNAKNKPDKKIIEGNTSENKGDYKKMIYNLLPGPNKMIPKVFLSSKTGVETYKPSAYILEGYKQNKHIKSSKDFDITFCHDLIDYFKNCIAIHPEWKNFGFDFSDTSTYEDISGFYREVELQGYKIDWTYISEKDIDLLQEKGQLYLFQIYNKDFSKKSTGNDNLHTMYLKNLFSEENLKDIVLKLNGEAEIFFRKSSIKNPIIHKKGSILVNRTYEAEEKDQFGNIQIVRKNIPENIYQELYKYFNDKSDKELSDEAAKLKNVVGHHEAATNIVKDYRYTYDKYFLHMPITINFKANKTGFINDRILQYIAKEKDLHVIGIDRGERNLIYVSVIDTCGNIVEQKSFNIVNGYDYQIKLKQQEGARQIARKEWKEIGKIKEIKEGYLSLVIHEISKMVIKYNAIIAMEDLSYGFKKGRFKVERQVYQKFETMLINKLNYLVFKDISITENGGLLKGYQLTYIPDKLKNVGHQCGCIFYVPAAYTSKIDPTTGFVNIFKFKDLTVDAKREFIKKFDSIRYDSEKNLFCFTFDYNNFITQNTVMSKSSWSVYTYGVRIKRRFVNGRFSNESDTIDITKDMEKTLEMTDINWRDGHDLRQDIIDYEIVQHIFEIFRLTVQMRNSLSELEDRDYDRLISPVLNENNIFYDSAKAGDALPKDADANGAYCIALKGLYEIKQITENWKEDGKFSRDKLKISNKDWFDFIQNKRYL

SEQ ID NO: 69 - DNA, 3789 bp, synthetic construct
  source 1..3789: mol_type = other DNA
atgaataacggtaccaataactttcaaaattttatcgggatctcctcgttgcaaaaaactcttcgtaatgctttaatcccgactgagacaacacagcagttcatcgttaaaaacggcatcattaaagaagatgagctgcgcggcgagaaccgtcagattttaaaggacatcatggacgactattaccgtgggttcatctcagaaacattaagcagcatcgatgatatcgactggacctcactgtttgagaagatggagattcaacttaagaatggagacaacaaagacactttaattaaggagcagacggaatatcgtaaagctatccataaaaaatttgcaaacgatgaccgtttcaaaaatatgttttccgcaaaattgattagcgacattttacctgaattcgtaatccataacaacaactattccgcatctgaaaaagaggagaagacccaagttatcaaacttttttcacgtttcgcgacatcttttaaagactactttaagaatcgtgcgaattgtttcagtgcagatgatatttcgtctagttcatgtcaccgtatcgtgaatgacaacgctgagattttcttttctaatgcgttggtgtatcgccgcatcgtaaagtccttgtcgaatgatgatatcaacaaaattagtggtgacatgaaagactccctgaaagaaatgtcattagaggagatttacagctacgaaaaatacggagagttcatcactcaggaaggtatctccttttacaacgatatttgcggcaaagttaatagtttcatgaatctgtattgtcagaagaataaggaaaacaagaatctgtacaagttacaaaagcttcataaacagatcttgtgcatcgccgacacgtcttatgaagtcccgtataaatttgaaagcgacgaagaagtatatcagagtgtgaatggattcttggacaatatctcatcaaaacacattgttgaacgtttgcgcaaaatcggcgacaactataacggatacaacttggataaaatttatatcgtatcaaaattttatgaatcagtatcccaaaagacttaccgtgattgggagactattaatacggcgttagaaatccattacaacaacattctgccgggtaacggtaaatcgaaagcggacaaagtgaagaaggcggttaagaacgatcttcagaagtctatcacggagattaatgagctggtttccaattacaagttgtgctcggatgataacatcaaagctgaaacctatatccatgaaatttctcatattcttaataacttcgaggcacaagaattaaaatataacccagaaattcatctggttgagagcgaacttaaagcttcagaattaaaaaatgttttggacgtaattatgaacgccttccattggtgcagcgtgtttatgacagaggagttagtagataaggataacaacttttatgcagaattggaagagatctatgatgagatctatccagtgatttcactgtataacttagtccgtaattacgtcactaaaaagccgtactcaactaaaaagatcaagttaaattttggaattccgacattggcggatggttggagtaagtctaaggaatactcaaataacgctattatcttaatgcgtgacaacctgtattacttgggtattttcaatgccaaaaataagcccgataaaaaaatcattgaagggaatacttcagaaaataagggagattacaaaaaaatgatttataaccttttgccaggcccaaacaaaatgatccccaaggtgtttttgagtagtaagacgggagtagaaacatataagccatcagcgtacattcttgaagggtacaaacaaaataaacacatcaagagcagcaaggactttgacattacattttgtcatgacttaatcgactactttaaaaattgcattgccattcaccctgagtggaaaaattttggtttcgacttcagtgatacctctacctatgaagatatctctggtttttatcgtgaggtagaacttcagggttacaagatcgattggacgtacatttccgagaaagacattgatcttttacaagagaagggtcagctttacttatttcagatctacaataaagacttttcgaaaaaatccacgggcaacgacaaccttcatacaatgtacttaaagaacctgttctctgaagaaaacttgaaagatatcgtgcttaaattgaatggcgaggccgagatttttttccgtaaaagctcgattaagaatcccatcatccacaagaaaggcagcattctggtaaatcgtacctatgaagcggaggaaaaggaccaatttggtaatattcagattgtccgtaagaacatccctgaaaatatctatcaagaattatataaatatttcaacgataagtcggacaaggaacttagcgatgaagccgcgaagttgaaaaatgttgttggtcaccacgaagcagcaacaaacattgtgaaagactatcgctacacttacgataagtactttttacatatgcctattacgattaactttaaggcaaataagacaggttttatcaacgaccgtatcctgcaatatattgcaaaagagaaggacctgcatgtcattgggattgatcgcggtgaacgcaatctgatttacgtgagtgttattgatacctgcggtaatattgttgagcaaaagtcttttaatatcgttaatggttacgactaccaaattaagcttaaacaacaggaaggtgcccgccagatcgcccgtaaggagtggaaggaaatcggaaaaattaaggaaatcaaagagggatatctgagcttggttattcatgaaatctcaaagatggttattaagtacaacgccatcatcgctatggaagacttatcgtatgggtttaaaaagggtcgtttcaaagttgagcgccaggtctaccaaaagtttgaaacgatgcttattaataaattaaactacttggttttcaaagatatctctattaccgagaatggaggtttactgaaaggataccagttaacgtatatccccgataagcttaaaaacgtgggccatcagtgtggctgtattttctatgtgcccgcggcatatacatcaaaaattgacccgacgacgggtttcgttaatatcttcaagttcaaagatctgacagttgatgcaaaacgcgaattcattaagaagttcgatagtattcgctatgactccgagaaaaatttgttttgcttcacttttgactacaataactttattactcagaatacagtcatgagtaaaagctcctggtcggtttacacgtacggggtacgcatcaaacgtcgttttgtgaatggtcgttttagtaatgagtcggatacaattgatattaccaaggatatggagaagactctggaaatgacagacatcaattggcgtgatggacatgatttgcgtcaggacattatcgactatgagattgtgcagcatattttcgaaatttttcgcctgacggtgcaaatgcgtaattccttaagcgaactggaagatcgcgactatgaccgcttaatttctcctgtgctgaatgagaacaacatcttctatgactcagcgaaagccggggacgctttgccaaaggatgcagatgctaacggtgcatattgtattgctctgaaaggcctttacgagatcaaacaaattactgaaaactggaaggaagatggaaagttttcccgtgataaattgaagatctctaataaggactggtttgactttatccaaaataaacgttattta

SEQ ID NO: 70 - protein, 1263 aa, synthetic construct
MNNGTNNFQNFIGISSLQKTLRNALIPTETTQQFIVKNGIIKEDELRGENRQILKDIMDDYYRGFISETLSSIDDIDWTSLFEKMEIQLKNGDNKDTLIKEQTEYRKAIHKKFANDDRFKNMFSAKLISDILPEFVIHNNNYSASEKEEKTQVIKLFSRFATSFKDYFKNRANCFSADDISSSSCHRIVNDNAEIFFSNALVYRRIVKSLSNDDINKISGDMKDSLKEMSLEEIYSYEKYGEFITQEGISFYNDICGKVNSFMNLYCQKNKENKNLYKLQKLHKQILCIADTSYEVPYKFESDEEVYQSVNGFLDNISSKHIVERLRKIGDNYNGYNLDKIYIVSKFYESVSQKTYRDWETINTALEIHYNNILPGNGKSKADKVKKAVKNDLQKSITEINELVSNYKLCSDDNIKAETYIHEISHILNNFEAQELKYNPEIHLVESELKASELKNVLDVIMNAFHWCSVFMTEELVDKDNNFYAELEEIYDEIYPVISLYNLVRNYVTKKPYSTKKIKLNFGIPTLADGWSKSKEYSNNAIILMRDNLYYLGIFNAKNKPDKKIIEGNTSENKGDYKKMIYNLLPGPNKMIPKVFLSSKTGVETYKPSAYILEGYKQNKHIKSSKDFDITFCHDLIDYFKNCIAIHPEWKNFGFDFSDTSTYEDISGFYREVELQGYKIDWTYISEKDIDLLQEKGQLYLFQIYNKDFSKKSTGNDNLHTMYLKNLFSEENLKDIVLKLNGEAEIFFRKSSIKNPIIHKKGSILVNRTYEAEEKDQFGNIQIVRKNIPENIYQELYKYFNDKSDKELSDEAAKLKNVVGHHEAATNIVKDYRYTYDKYFLHMPITINFKANKTGFINDRILQYIAKEKDLHVIGIDRGERNLIYVSVIDTCGNIVEQKSFNIVNGYDYQIKLKQQEGARQIARKEWKEIGKIKEIKEGYLSLVIHEISKMVIKYNAIIAMEDLSYGFKKGRFKVERQVYQKFETMLINKLNYLVFKDISITENGGLLKGYQLTYIPDKLKNVGHQCGCIFYVPAAYTSKIDPTTGFVNIFKFKDLTVDAKREFIKKFDSIRYDSEKNLFCFTFDYNNFITQNTVMSKSSWSVYTYGVRIKRRFVNGRFSNESDTIDITKDMEKTLEMTDINWRDGHDLRQDIIDYEIVQHIFEIFRLTVQMRNSLSELEDRDYDRLISPVLNENNIFYDSAKAGDALPKDADANGAYCIALKGLYEIKQITENWKEDGKFSRDKLKISNKDWFDFIQNKRYL

SEQ ID NO: 71 - DNA, 3789 bp, synthetic construct
  source 1..3789: mol_type = other DNA
atgaataacggtaccaataactttcaaaattttatcgggatctcctcgttgcaaaaaactcttcgtaatgctttaatcccgactgagacaacacagcagttcatcgttaaaaacggcatcattaaagaagatgagctgcgcggcgagaaccgtcagattttaaaggacatcatggacgactattaccgtgggttcatctcagaaacattaagcagcatcgatgatatcgactggacctcactgtttgagaagatggagattcaacttaagaatggagacaacaaagacactttaattaaggagcagacggaatatcgtaaagctatccataaaaaatttgcaaacgatgaccgtttcaaaaatatgttttccgcaaaattgattagcgacattttacctgaattcgtaatccataacaacaactattccgcatctgaaaaagaggagaagacccaagttatcaaacttttttcacgtttcgcgacatcttttaaagactactttaagaatcgtgcgaattgtttcagtgcagatgatatttcgtctagttcatgtcaccgtatcgtgaatgacaacgctgagattttcttttctaatgcgttggtgtatcgccgcatcgtaaagtccttgtcgaatgatgatatcaacaaaattagtggtgacatgaaagactccctgaaagaaatgtcattagaggagatttacagctacgaaaaatacggagagttcatcactcaggaaggtatctccttttacaacgatatttgcggcaaagttaatagtttcatgaatctgtattgtcagaagaataaggaaaacaagaatctgtacaagttacaaaagcttcataaacagatcttgtgcatcgccgacacgtcttatgaagtcccgtataaatttgaaagcgacgaagaagtatatcagagtgtgaatggattcttggacaatatctcatcaaaacacattgttgaacgtttgcgcaaaatcggcgacaactataacggatacaacttggataaaatttatatcgtatcaaaattttatgaatcagtatcccaaaagacttaccgtgattgggagactattaatacggcgttagaaatccattacaacaacattctgccgggtaacggtaaatcgaaagcggacaaagtgaagaaggcggttaagaacgatcttcagaagtctatcacggagattaatgagctggtttccaattacaagttgtgctcggatgataacatcaaagctgaaacctatatccatgaaatttctcatattcttaataacttcgaggcacaagaattaaaatataacccagaaattcatctggttgagagcgaacttaaagcttcagaattaaaaaatgttttggacgtaattatgaacgccttccattggtgcagcgtgtttatgacagaggagttagtagataaggataacaacttttatgcagaattggaagagatctatgatgagatctatccagtgatttcactgtataacttagtccgtaattacgtcactcagaaggtgtactcaactaaaaagatcaagttaaattttggaattccgacattggcggatggttggagtaagtctaaggaatactcaaataacgctattatcttaatgcgtgacaacctgtattacttgggtattttcaatgccaaaaataagcccgataaaaaaatcattgaagggaatacttcagaaaataagggagattacaaaaaaatgatttataaccttttgccaggcccaaacaaaatgatccccaaggtgtttttgagtagtaagacgggagtagaaacatataagccatcagcgtacattcttgaagggtacaaacaaaataaacacatcaagagcagcaaggactttgacattacattttgtcatgacttaatcgactactttaaaaattgcattgccattcaccctgagtggaaaaattttggtttcgacttcagtgatacctctacctatgaagatatctctggtttttatcgtgaggtagaacttcagggttacaagatcgattggacgtacatttccgagaaagacattgatcttttacaagagaagggtcagctttacttatttcagatctacaataaagacttttcgaaaaaatccacgggcaacgacaaccttcatacaatgtacttaaagaacctgttctctgaagaaaacttgaaagatatcgtgcttaaattgaatggcgaggccgagatttttttccgtaaaagctcgattaagaatcccatcatccacaagaaaggcagcattctggtaaatcgtacctatgaagcggaggaaaaggaccaatttggtaatattcagattgtccgtaagaacatccctgaaaatatctatcaagaattatataaatatttcaacgataagtcggacaaggaacttagcgatgaagccgcgaagttgaaaaatgttgttggtcaccacgaagcagcaacaaacattgtgaaagactatcgctacacttacgataagtactttttacatatgcctattacgattaactttaaggcaaataagacaggttttatcaacgaccgtatcctgcaatatattgcaaaagagaaggacctgcatgtcattgggattgatcgcggtgaacgcaatctgatttacgtgagtgttattgatacctgcggtaatattgttgagcaaaagtcttttaatatcgttaatggttacgactaccaaattaagcttaaacaacaggaaggtgcccgccagatcgcccgtaaggagtggaaggaaatcggaaaaattaaggaaatcaaagagggatatctgagcttggttattcatgaaatctcaaagatggttattaagtacaacgccatcatcgctatggaagacttatcgtatgggtttaaaaagggtcgtttcaaagttgagcgccaggtctaccaaaagtttgaaacgatgcttattaataaattaaactacttggttttcaaagatatctctattaccgagaatggaggtttactgaaaggataccagttaacgtatatccccgataagcttaaaaacgtgggccatcagtgtggctgtattttctatgtgcccgcggcatatacatcaaaaattgacccgacgacgggtttcgttaatatcttcaagttcaaagatctgacagttgatgcaaaacgcgaattcattaagaagttcgatagtattcgctatgactccgagaaaaatttgttttgcttcacttttgactacaataactttattactcagaatacagtcatgagtaaaagctcctggtcggtttacacgtacggggtacgcatcaaacgtcgttttgtgaatggtcgttttagtaatgagtcggatacaattgatattaccaaggatatggagaagactctggaaatgacagacatcaattggcgtgatggacatgatttgcgtcaggacattatcgactatgagattgtgcagcatattttcgaaatttttcgcctgacggtgcaaatgcgtaattccttaagcgaactggaagatcgcgactatgaccgcttaatttctcctgtgctgaatgagaacaacatcttctatgactcagcgaaagccggggacgctttgccaaaggatgcagatgctaacggtgcatattgtattgctctgaaaggcctttacgagatcaaacaaattactgaaaactggaaggaagatggaaagttttcccgtgataaattgaagatctctaataaggactggtttgactttatccaaaataaacgttattta

SEQ ID NO: 72 - protein, 1263 aa, synthetic construct
MNNGTNNFQNFIGISSLQKTLRNALIPTETTQQFIVKNGIIKEDELRGENRQILKDIMDDYYRGFISETLSSIDDIDWTSLFEKMEIQLKNGDNKDTLIKEQTEYRKAIHKKFANDDRFKNMFSAKLISDILPEFVIHNNNYSASEKEEKTQVIKLFSRFATSFKDYFKNRANCFSADDISSSSCHRIVNDNAEIFFSNALVYRRIVKSLSNDDINKISGDMKDSLKEMSLEEIYSYEKYGEFITQEGISFYNDICGKVNSFMNLYCQKNKENKNLYKLQKLHKQILCIADTSYEVPYKFESDEEVYQSVNGFLDNISSKHIVERLRKIGDNYNGYNLDKIYIVSKFYESVSQKTYRDWETINTALEIHYNNILPGNGKSKADKVKKAVKNDLQKSITEINELVSNYKLCSDDNIKAETYIHEISHILNNFEAQELKYNPEIHLVESELKASELKNVLDVIMNAFHWCSVFMTEELVDKDNNFYAELEEIYDEIYPVISLYNLVRNYVTQKVYSTKKIKLNFGIPTLADGWSKSKEYSNNAIILMRDNLYYLGIFNAKNKPDKKIIEGNTSENKGDYKKMIYNLLPGPNKMIPKVFLSSKTGVETYKPSAYILEGYKQNKHIKSSKDFDITFCHDLIDYFKNCIAIHPEWKNFGFDFSDTSTYEDISGFYREVELQGYKIDWTYISEKDIDLLQEKGQLYLFQIYNKDFSKKSTGNDNLHTMYLKNLFSEENLKDIVLKLNGEAEIFFRKSSIKNPIIHKKGSILVNRTYEAEEKDQFGNIQIVRKNIPENIYQELYKYFNDKSDKELSDEAAKLKNVVGHHEAATNIVKDYRYTYDKYFLHMPITINFKANKTGFINDRILQYIAKEKDLHVIGIDRGERNLIYVSVIDTCGNIVEQKSFNIVNGYDYQIKLKQQEGARQIARKEWKEIGKIKEIKEGYLSLVIHEISKMVIKYNAIIAMEDLSYGFKKGRFKVERQVYQKFETMLINKLNYLVFKDISITENGGLLKGYQLTYIPDKLKNVGHQCGCIFYVPAAYTSKIDPTTGFVNIFKFKDLTVDAKREFIKKFDSIRYDSEKNLFCFTFDYNNFITQNTVMSKSSWSVYTYGVRIKRRFVNGRFSNESDTIDITKDMEKTLEMTDINWRDGHDLRQDIIDYEIVQHIFEIFRLTVQMRNSLSELEDRDYDRLISPVLNENNIFYDSAKAGDALPKDADANGAYCIALKGLYEIKQITENWKEDGKFSRDKLKISNKDWFDFIQNKRYL

SEQ ID NO: 73 - DNA, 3789 bp, synthetic construct
  source 1..3789: mol_type = other DNA
atgaataacggtaccaataactttcaaaattttatcgggatctcctcgttgcaaaaaactcttcgtaatgctttaatcccgactgagacaacacagcagttcatcgttaaaaacggcatcattaaagaagatgagctgcgcggcgagaaccgtcagattttaaaggacatcatggacgactattaccgtgggttcatctcagaaacattaagcagcatcgatgatatcgactggacctcactgtttgagaagatggagattcaacttaagaatggagacaacaaagacactttaattaaggagcagacggaatatcgtaaagctatccataaaaaatttgcaaacgatgaccgtttcaaaaatatgttttccgcaaaattgattagcgacattttacctgaattcgtaatccataacaacaactattccgcatctgaaaaagaggagaagacccaagttatcaaacttttttcacgtttcgcgacatcttttaaagactactttaagaatcgtgcgaattgtttcagtgcagatgatatttcgtctagttcatgtcaccgtatcgtgaatgacaacgctgagattttcttttctaatgcgttggtgtatcgccgcatcgtaaagtccttgtcgaatgatgatatcaacaaaattagtggtgacatgaaagactccctgaaagaaatgtcattagaggagatttacagctacgaaaaatacggagagttcatcactcaggaaggtatctccttttacaacgatatttgcggcaaagttaatagtttcatgaatctgtattgtcagaagaataaggaaaacaagaatctgtacaagttacaaaagcttcataaacagatcttgtgcatcgccgacacgtcttatgaagtcccgtataaatttgaaagcgacgaagaagtatatcagagtgtgaatggattcttggacaatatctcatcaaaacacattgttgaacgtttgcgcaaaatcggcgacaactataacggatacaacttggataaaatttatatcgtatcaaaattttatgaatcagtatcccaaaagacttaccgtgattgggagactattaatacggcgttagaaatccattacaacaacattctgccgggtaacggtaaatcgaaagcggacaaagtgaagaaggcggttaagaacgatcttcagaagtctatcacggagattaatgagctggtttccaattacaagttgtgctcggatgataacatcaaagctgaaacctatatccatgaaatttctcatattcttaataacttcgaggcacaagaattaaaatataacccagaaattcatctggttgagagcgaacttaaagcttcagaattaaaaaatgttttggacgtaattatgaacgccttccattggtgcagcgtgtttatgacagaggagttagtagataaggataacaacttttatgcagaattggaagagatctatgatgagatctatccagtgatttcactgtataacttagtccgtaattacgtcactcagaagggctactcaactaaaaagatcaagttaaattttggaattccgacattggcggatggttggagtaagtctaaggaatactcaaataacgctattatcttaatgcgtgacaacctgtattacttgggtattttcaatgccaaaaataagcccgataaaaaaatcattgaagggaatacttcagaaaataagggagattacaaaaaaatgatttataaccttttgccaggcccaaacaaaatgatccccaaggtgtttttgagtagtaagacgggagtagaaacatataagccatcagcgtacattcttgaagggtacaaacaaaataaacacatcaagagcagcaaggactttgacattacattttgtcatgacttaatcgactactttaaaaattgcattgccattcaccctgagtggaaaaattttggtttcgacttcagtgatacctctacctatgaagatatctctggtttttatcgtgaggtagaacttcagggttacaagatcgattggacgtacatttccgagaaagacattgatcttttacaagagaagggtcagctttacttatttcagatctacaataaagacttttcgaaaaaatccacgggcaacgacaaccttcatacaatgtacttaaagaacctgttctctgaagaaaacttgaaagatatcgtgcttaaattgaatggcgaggccgagatttttttccgtaaaagctcgattaagaatcccatcatccacaagaaaggcagcattctggtaaatcgtacctatgaagcggaggaaaaggaccaatttggtaatattcagattgtccgtaagaacatccctgaaaatatctatcaagaattatataaatatttcaacgataagtcggacaaggaacttagcgatgaagccgcgaagttgaaaaatgttgttggtcaccacgaagcagcaacaaacattgtgaaagactatcgctacacttacgataagtactttttacatatgcctattacgattaactttaaggcaaataagacaggttttatcaacgaccgtatcctgcaatatattgcaaaagagaaggacctgcatgtcattgggattgatcgcggtgaacgcaatctgatttacgtgagtgttattgatacctgcggtaatattgttgagcaaaagtcttttaatatcgttaatggttacgactaccaaattaagcttaaacaacaggaaggtgcccgccagatcgcccgtaaggagtggaaggaaatcggaaaaattaaggaaatcaaagagggatatctgagcttggttattcatgaaatctcaaagatggttattaagtacaacgccatcatcgctatggaagacttatcgtatgggtttaaaaagggtcgtttcaaagttgagcgccaggtctaccaaaagtttgaaacgatgcttattaataaattaaactacttggttttcaaagatatctctattaccgagaatggaggtttactgaaaggataccagttaacgtatatccccgataagcttaaaaacgtgggccatcagtgtggctgtattttctatgtgcccgcggcatatacatcaaaaattgacccgacgacgggtttcgttaatatcttcaagttcaaagatctgacagttgatgcaaaacgcgaattcattaagaagttcgatagtattcgctatgactccgagaaaaatttgttttgcttcacttttgactacaataactttattactcagaatacagtcatgagtaaaagctcctggtcggtttacacgtacggggtacgcatcaaacgtcgttttgtgaatggtcgttttagtaatgagtcggatacaattgatattaccaaggatatggagaagactctggaaatgacagacatcaattggcgtgatggacatgatttgcgtcaggacattatcgactatgagattgtgcagcatattttcgaaatttttcgcctgacggtgcaaatgcgtaattccttaagcgaactggaagatcgcgactatgaccgcttaatttctcctgtgctgaatgagaacaacatcttctatgactcagcgaaagccggggacgctttgccaaaggatgcagatgctaacggtgcatattgtattgctctgaaaggcctttacgagatcaaacaaattactgaaaactggaaggaagatggaaagttttcccgtgataaattgaagatctctaataaggactggtttgactttatccaaaataaacgttattta

SEQ ID NO: 74 - protein, 1263 aa, synthetic construct
MNNGTNNFQNFIGISSLQKTLRNALIPTETTQQFIVKNGIIKEDELRGENRQILKDIMDDYYRGFISETLSSIDDIDWTSLFEKMEIQLKNGDNKDTLIKEQTEYRKAIHKKFANDDRFKNMFSAKLISDILPEFVIHNNNYSASEKEEKTQVIKLFSRFATSFKDYFKNRANCFSADDISSSSCHRIVNDNAEIFFSNALVYRRIVKSLSNDDINKISGDMKDSLKEMSLEEIYSYEKYGEFITQEGISFYNDICGKVNSFMNLYCQKNKENKNLYKLQKLHKQILCIADTSYEVPYKFESDEEVYQSVNGFLDNISSKHIVERLRKIGDNYNGYNLDKIYIVSKFYESVSQKTYRDWETINTALEIHYNNILPGNGKSKADKVKKAVKNDLQKSITEINELVSNYKLCSDDNIKAETYIHEISHILNNFEAQELKYNPEIHLVESELKASELKNVLDVIMNAFHWCSVFMTEELVDKDNNFYAELEEIYDEIYPVISLYNLVRNYVTQKGYSTKKIKLNFGIPTLADGWSKSKEYSNNAIILMRDNLYYLGIFNAKNKPDKKIIEGNTSENKGDYKKMIYNLLPGPNKMIPKVFLSSKTGVETYKPSAYILEGYKQNKHIKSSKDFDITFCHDLIDYFKNCIAIHPEWKNFGFDFSDTSTYEDISGFYREVELQGYKIDWTYISEKDIDLLQEKGQLYLFQIYNKDFSKKSTGNDNLHTMYLKNLFSEENLKDIVLKLNGEAEIFFRKSSIKNPIIHKKGSILVNRTYEAEEKDQFGNIQIVRKNIPENIYQELYKYFNDKSDKELSDEAAKLKNVVGHHEAATNIVKDYRYTYDKYFLHMPITINFKANKTGFINDRILQYIAKEKDLHVIGIDRGERNLIYVSVIDTCGNIVEQKSFNIVNGYDYQIKLKQQEGARQIARKEWKEIGKIKEIKEGYLSLVIHEISKMVIKYNAIIAMEDLSYGFKKGRFKVERQVYQKFETMLINKLNYLVFKDISITENGGLLKGYQLTYIPDKLKNVGHQCGCIFYVPAAYTSKIDPTTGFVNIFKFKDLTVDAKREFIKKFDSIRYDSEKNLFCFTFDYNNFITQNTVMSKSSWSVYTYGVRIKRRFVNGRFSNESDTIDITKDMEKTLEMTDINWRDGHDLRQDIIDYEIVQHIFEIFRLTVQMRNSLSELEDRDYDRLISPVLNENNIFYDSAKAGDALPKDADANGAYCIALKGLYEIKQITENWKEDGKFSRDKLKISNKDWFDFIQNKRYL

SEQ ID NO: 75 - DNA, 3789 bp, synthetic construct
  source 1..3789: mol_type = other DNA
atgaataacggtaccaataactttcaaaattttatcgggatctcctcgttgcaaaaaactcttcgtaatgctttaatcccgactgagacaacacagcagttcatcgttaaaaacggcatcattaaagaagatgagctgcgcggcgagaaccgtcagattttaaaggacatcatggacgactattaccgtgggttcatctcagaaacattaagcagcatcgatgatatcgactggacctcactgtttgagaagatggagattcaacttaagaatggagacaacaaagacactttaattaaggagcagacggaatatcgtaaagctatccataaaaaatttgcaaacgatgaccgtttcaaaaatatgttttccgcaaaattgattagcgacattttacctgaattcgtaatccataacaacaactattccgcatctgaaaaagaggagaagacccaagttatcaaacttttttcacgtttcgcgacatcttttaaagactactttaagaatcgtgcgaattgtttcagtgcagatgatatttcgtctagttcatgtcaccgtatcgtgaatgacaacgctgagattttcttttctaatgcgttggtgtatcgccgcatcgtaaagtccttgtcgaatgatgatatcaacaaaattagtggtgacatgaaagactccctgaaagaaatgtcattagaggagatttacagctacgaaaaatacggagagttcatcactcaggaaggtatctccttttacaacgatatttgcggcaaagttaatagtttcatgaatctgtattgtcagaagaataaggaaaacaagaatctgtacaagttacaaaagcttcataaacagatcttgtgcatcgccgacacgtcttatgaagtcccgtataaatttgaaagcgacgaagaagtatatcagagtgtgaatggattcttggacaatatctcatcaaaacacattgttgaacgtttgcgcaaaatcggcgacaactataacggatacaacttggataaaatttatatcgtatcaaaattttatgaatcagtatcccaaaagacttaccgtgattgggagactattaatacggcgttagaaatccattacaacaacattctgccgggtaacggtaaatcgaaagcggacaaagtgaagaaggcggttaagaacgatcttcagaagtctatcacggagattaatgagctggtttccaattacaagttgtgctcggatgataacatcaaagctgaaacctatatccatgaaatttctcatattcttaataacttcgaggcacaagaattaaaatataacccagaaattcatctggttgagagcgaacttaaagcttcagaattaaaaaatgttttggacgtaattatgaacgccttccattggtgcagcgtgtttatgacagaggagttagtagataaggataacaacttttatgcagaattggaagagatctatgatgagatctatccagtgatttcactgtataacttagtccgtaattacgtcactcagaagccgagctcaactaaaaagatcaagttaaattttggaattccgacattggcggatggttggagtaagtctaaggaatactcaaataacgctattatcttaatgcgtgacaacctgtattacttgggtattttcaatgccaaaaataagcccgataaaaaaatcattgaagggaatacttcagaaaataagggagattacaaaaaaatgatttataaccttttgccaggcccaaacaaaatgatccccaaggtgtttttgagtagtaagacgggagtagaaacatataagccatcagcgtacattcttgaagggtacaaacaaaataaacacatcaagagcagcaaggactttgacattacattttgtcatgacttaatcgactactttaaaaattgcattgccattcaccctgagtggaaaaattttggtttcgacttcagtgatacctctacctatgaagatatctctggtttttatcgtgaggtagaacttcagggttacaagatcgattggacgtacatttccgagaaagacattgatcttttacaagagaagggtcagctttacttatttcagatctacaataaagacttttcgaaaaaatccacgggcaacgacaaccttcatacaatgtacttaaagaacctgttctctgaagaaaacttgaaagatatcgtgcttaaattgaatggcgaggccgagatttttttccgtaaaagctcgattaagaatcccatcatccacaagaaaggcagcattctggtaaatcgtacctatgaagcggaggaaaaggaccaatttggtaatattcagattgtccgtaagaacatccctgaaaatatctatcaagaattatataaatatttcaacgataagtcggacaaggaacttagcgatgaagccgcgaagttgaaaaatgttgttggtcaccacgaagcagcaacaaacattgtgaaagactatcgctacacttacgataagtactttttacatatgcctattacgattaactttaaggcaaataagacaggttttatcaacgaccgtatcctgcaatatattgcaaaagagaaggacctgcatgtcattgggattgatcgcggtgaacgcaatctgatttacgtgagtgttattgatacctgcggtaatattgttgagcaaaagtcttttaatatcgttaatggttacgactaccaaattaagcttaaacaacaggaaggtgcccgccagatcgcccgtaaggagtggaaggaaatcggaaaaattaaggaaatcaaagagggatatctgagcttggttattcatgaaatctcaaagatggttattaagtacaacgccatcatcgctatggaagacttatcgtatgggtttaaaaagggtcgtttcaaagttgagcgccaggtctaccaaaagtttgaaacgatgcttattaataaattaaactacttggttttcaaagatatctctattaccgagaatggaggtttactgaaaggataccagttaacgtatatccccgataagcttaaaaacgtgggccatcagtgtggctgtattttctatgtgcccgcggcatatacatcaaaaattgacccgacgacgggtttcgttaatatcttcaagttcaaagatctgacagttgatgcaaaacgcgaattcattaagaagttcgatagtattcgctatgactccgagaaaaatttgttttgcttcacttttgactacaataactttattactcagaatacagtcatgagtaaaagctcctggtcggtttacacgtacggggtacgcatcaaacgtcgttttgtgaatggtcgttttagtaatgagtcggatacaattgatattaccaaggatatggagaagactctggaaatgacagacatcaattggcgtgatggacatgatttgcgtcaggacattatcgactatgagattgtgcagcatattttcgaaatttttcgcctgacggtgcaaatgcgtaattccttaagcgaactggaagatcgcgactatgaccgcttaatttctcctgtgctgaatgagaacaacatcttctatgactcagcgaaagccggggacgctttgccaaaggatgcagatgctaacggtgcatattgtattgctctgaaaggcctttacgagatcaaacaaattactgaaaactggaaggaagatggaaagttttcccgtgataaattgaagatctctaataaggactggtttgactttatccaaaataaacgttattta

SEQ ID NO: 76 - protein, 1263 aa, synthetic construct
MNNGTNNFQNFIGISSLQKTLRNALIPTETTQQFIVKNGIIKEDELRGENRQILKDIMDDYYRGFISETLSSIDDIDWTSLFEKMEIQLKNGDNKDTLIKEQTEYRKAIHKKFANDDRFKNMFSAKLISDILPEFVIHNNNYSASEKEEKTQVIKLFSRFATSFKDYFKNRANCFSADDISSSSCHRIVNDNAEIFFSNALVYRRIVKSLSNDDINKISGDMKDSLKEMSLEEIYSYEKYGEFITQEGISFYNDICGKVNSFMNLYCQKNKENKNLYKLQKLHKQILCIADTSYEVPYKFESDEEVYQSVNGFLDNISSKHIVERLRKIGDNYNGYNLDKIYIVSKFYESVSQKTYRDWETINTALEIHYNNILPGNGKSKADKVKKAVKNDLQKSITEINELVSNYKLCSDDNIKAETYIHEISHILNNFEAQELKYNPEIHLVESELKASELKNVLDVIMNAFHWCSVFMTEELVDKDNNFYAELEEIYDEIYPVISLYNLVRNYVTQKPSSTKKIKLNFGIPTLADGWSKSKEYSNNAIILMRDNLYYLGIFNAKNKPDKKIIEGNTSENKGDYKKMIYNLLPGPNKMIPKVFLSSKTGVETYKPSAYILEGYKQNKHIKSSKDFDITFCHDLIDYFKNCIAIHPEWKNFGFDFSDTSTYEDISGFYREVELQGYKIDWTYISEKDIDLLQEKGQLYLFQIYNKDFSKKSTGNDNLHTMYLKNLFSEENLKDIVLKLNGEAEIFFRKSSIKNPIIHKKGSILVNRTYEAEEKDQFGNIQIVRKNIPENIYQELYKYFNDKSDKELSDEAAKLKNVVGHHEAATNIVKDYRYTYDKYFLHMPITINFKANKTGFINDRILQYIAKEKDLHVIGIDRGERNLIYVSVIDTCGNIVEQKSFNIVNGYDYQIKLKQQEGARQIARKEWKEIGKIKEIKEGYLSLVIHEISKMVIKYNAIIAMEDLSYGFKKGRFKVERQVYQKFETMLINKLNYLVFKDISITENGGLLKGYQLTYIPDKLKNVGHQCGCIFYVPAAYTSKIDPTTGFVNIFKFKDLTVDAKREFIKKFDSIRYDSEKNLFCFTFDYNNFITQNTVMSKSSWSVYTYGVRIKRRFVNGRFSNESDTIDITKDMEKTLEMTDINWRDGHDLRQDIIDYEIVQHIFEIFRLTVQMRNSLSELEDRDYDRLISPVLNENNIFYDSAKAGDALPKDADANGAYCIALKGLYEIKQITENWKEDGKFSRDKLKISNKDWFDFIQNKRYL

SEQ ID NO: 77 - DNA, 3789 bp, synthetic construct
  source 1..3789: mol_type = other DNA
atgaataacggtaccaataactttcaaaattttatcgggatctcctcgttgcaaaaaactcttcgtaatgctttaatcccgactgagacaacacagcagttcatcgttaaaaacggcatcattaaagaagatgagctgcgcggcgagaaccgtcagattttaaaggacatcatggacgactattaccgtgggttcatctcagaaacattaagcagcatcgatgatatcgactggacctcactgtttgagaagatggagattcaacttaagaatggagacaacaaagacactttaattaaggagcagacggaatatcgtaaagctatccataaaaaatttgcaaacgatgaccgtttcaaaaatatgttttccgcaaaattgattagcgacattttacctgaattcgtaatccataacaacaactattccgcatctgaaaaagaggagaagacccaagttatcaaacttttttcacgtttcgcgacatcttttaaagactactttaagaatcgtgcgaattgtttcagtgcagatgatatttcgtctagttcatgtcaccgtatcgtgaatgacaacgctgagattttcttttctaatgcgttggtgtatcgccgcatcgtaaagtccttgtcgaatgatgatatcaacaaaattagtggtgacatgaaagactccctgaaagaaatgtcattagaggagatttacagctacgaaaaatacggagagttcatcactcaggaaggtatctccttttacaacgatatttgcggcaaagttaatagtttcatgaatctgtattgtcagaagaataaggaaaacaagaatctgtacaagttacaaaagcttcataaacagatcttgtgcatcgccgacacgtcttatgaagtcccgtataaatttgaaagcgacgaagaagtatatcagagtgtgaatggattcttggacaatatctcatcaaaacacattgttgaacgtttgcgcaaaatcggcgacaactataacggatacaacttggataaaatttatatcgtatcaaaattttatgaatcagtatcccaaaagacttaccgtgattgggagactattaatacggcgttagaaatccattacaacaacattctgccgggtaacggtaaatcgaaagcggacaaagtgaagaaggcggttaagaacgatcttcagaagtctatcacggagattaatgagctggtttccaattacaagttgtgctcggatgataacatcaaagctgaaacctatatccatgaaatttctcatattcttaataacttcgaggcacaagaattaaaatataacccagaaattcatctggttgagagcgaacttaaagcttcagaattaaaaaatgttttggacgtaattatgaacgccttccattggtgcagcgtgtttatgacagaggagttagtagataaggataacaacttttatgcagaattggaagagatctatgatgagatctatccagtgatttcactgtataacttagtccgtaattacgtcactcagaagccgcgttcaactaaaaagatcaagttaaattttggaattccgacattggcggatggttggagtaagtctaaggaatactcaaataacgctattatcttaatgcgtgacaacctgtattacttgggtattttcaatgccaaaaataagcccgataaaaaaatcattgaagggaatacttcagaaaataagggagattacaaaaaaatgatttataaccttttgccaggcccaaacaaaatgatccccaaggtgtttttgagtagtaagacgggagtagaaacatataagccatcagcgtacattcttgaagggtacaaacaaaataaacacatcaagagcagcaaggactttgacattacattttgtcatgacttaatcgactactttaaaaattgcattgccattcaccctgagtggaaaaattttggtttcgacttcagtgatacctctacctatgaagatatctctggtttttatcgtgaggtagaacttcagggttacaagatcgattggacgtacatttccgagaaagacattgatcttttacaagagaagggtcagctttacttatttcagatctacaataaagacttttcgaaaaaatccacgggcaacgacaaccttcatacaatgtacttaaagaacctgttctctgaagaaaacttgaaagatatcgtgcttaaattgaatggcgaggccgagatttttttccgtaaaagctcgattaagaatcccatcatccacaagaaaggcagcattctggtaaatcgtacctatgaagcggaggaaaaggaccaatttggtaatattcagattgtccgtaagaacatccctgaaaatatctatcaagaattatataaatatttcaacgataagtcggacaaggaacttagcgatgaagccgcgaagttgaaaaatgttgttggtcaccacgaagcagcaacaaacattgtgaaagactatcgctacacttacgataagtactttttacatatgcctattacgattaactttaaggcaaataagacaggttttatcaacgaccgtatcctgcaatatattgcaaaagagaaggacctgcatgtcattgggattgatcgcggtgaacgcaatctgatttacgtgagtgttattgatacctgcggtaatattgttgagcaaaagtcttttaatatcgttaatggttacgactaccaaattaagcttaaacaacaggaaggtgcccgccagatcgcccgtaaggagtggaaggaaatcggaaaaattaaggaaatcaaagagggatatctgagcttggttattcatgaaatctcaaagatggttattaagtacaacgccatcatcgctatggaagacttatcgtatgggtttaaaaagggtcgtttcaaagttgagcgccaggtctaccaaaagtttgaaacgatgcttattaataaattaaactacttggttttcaaagatatctctattaccgagaatggaggtttactgaaaggataccagttaacgtatatccccgataagcttaaaaacgtgggccatcagtgtggctgtattttctatgtgcccgcggcatatacatcaaaaattgacccgacgacgggtttcgttaatatcttcaagttcaaagatctgacagttgatgcaaaacgcgaattcattaagaagttcgatagtattcgctatgactccgagaaaaatttgttttgcttcacttttgactacaataactttattactcagaatacagtcatgagtaaaagctcctggtcggtttacacgtacggggtacgcatcaaacgtcgttttgtgaatggtcgttttagtaatgagtcggatacaattgatattaccaaggatatggagaagactctggaaatgacagacatcaattggcgtgatggacatgatttgcgtcaggacattatcgactatgagattgtgcagcatattttcgaaatttttcgcctgacggtgcaaatgcgtaattccttaagcgaactggaagatcgcgactatgaccgcttaatttctcctgtgctgaatgagaacaacatcttctatgactcagcgaaagccggggacgctttgccaaaggatgcagatgctaacggtgcatattgtattgctctgaaaggcctttacgagatcaaacaaattactgaaaactggaaggaagatggaaagttttcccgtgataaattgaagatctctaataaggactggtttgactttatccaaaataaacgttattta

SEQ ID NO: 78 - protein, 1263 aa, synthetic construct
MNNGTNNFQNFIGISSLQKTLRNALIPTETTQQFIVKNGIIKEDELRGENRQILKDIMDDYYRGFISETLSSIDDIDWTSLFEKMEIQLKNGDNKDTLIKEQTEYRKAIHKKFANDDRFKNMFSAKLISDILPEFVIHNNNYSASEKEEKTQVIKLFSRFATSFKDYFKNRANCFSADDISSSSCHRIVNDNAEIFFSNALVYRRIVKSLSNDDINKISGDMKDSLKEMSLEEIYSYEKYGEFITQEGISFYNDICGKVNSFMNLYCQKNKENKNLYKLQKLHKQILCIADTSYEVPYKFESDEEVYQSVNGFLDNISSKHIVERLRKIGDNYNGYNLDKIYIVSKFYESVSQKTYRDWETINTALEIHYNNILPGNGKSKADKVKKAVKNDLQKSITEINELVSNYKLCSDDNIKAETYIHEISHILNNFEAQELKYNPEIHLVESELKASELKNVLDVIMNAFHWCSVFMTEELVDKDNNFYAELEEIYDEIYPVISLYNLVRNYVTQKPRSTKKIKLNFGIPTLADGWSKSKEYSNNAIILMRDNLYYLGIFNAKNKPDKKIIEGNTSENKGDYKKMIYNLLPGPNKMIPKVFLSSKTGVETYKPSAYILEGYKQNKHIKSSKDFDITFCHDLIDYFKNCIAIHPEWKNFGFDFSDTSTYEDISGFYREVELQGYKIDWTYISEKDIDLLQEKGQLYLFQIYNKDFSKKSTGNDNLHTMYLKNLFSEENLKDIVLKLNGEAEIFFRKSSIKNPIIHKKGSILVNRTYEAEEKDQFGNIQIVRKNIPENIYQELYKYFNDKSDKELSDEAAKLKNVVGHHEAATNIVKDYRYTYDKYFLHMPITINFKANKTGFINDRILQYIAKEKDLHVIGIDRGERNLIYVSVIDTCGNIVEQKSFNIVNGYDYQIKLKQQEGARQIARKEWKEIGKIKEIKEGYLSLVIHEISKMVIKYNAIIAMEDLSYGFKKGRFKVERQVYQKFETMLINKLNYLVFKDISITENGGLLKGYQLTYIPDKLKNVGHQCGCIFYVPAAYTSKIDPTTGFVNIFKFKDLTVDAKREFIKKFDSIRYDSEKNLFCFTFDYNNFITQNTVMSKSSWSVYTYGVRIKRRFVNGRFSNESDTIDITKDMEKTLEMTDINWRDGHDLRQDIIDYEIVQHIFEIFRLTVQMRNSLSELEDRDYDRLISPVLNENNIFYDSAKAGDALPKDADANGAYCIALKGLYEIKQITENWKEDGKFSRDKLKISNKDWFDFIQNKRYL

SEQ ID NO: 79 - DNA, 3789 bp, synthetic construct
  source 1..3789: mol_type = other DNA
atgaataacggtaccaataactttcaaaattttatcgggatctcctcgttgcaaaaaactcttcgtaatgctttaatcccgactgagacaacacagcagttcatcgttaaaaacggcatcattaaagaagatgagctgcgcggcgagaaccgtcagattttaaaggacatcatggacgactattaccgtgggttcatctcagaaacattaagcagcatcgatgatatcgactggacctcactgtttgagaagatggagattcaacttaagaatggagacaacaaagacactttaattaaggagcagacggaatatcgtaaagctatccataaaaaatttgcaaacgatgaccgtttcaaaaatatgttttccgcaaaattgattagcgacattttacctgaattcgtaatccataacaacaactattccgcatctgaaaaagaggagaagacccaagttatcaaacttttttcacgtttcgcgacatcttttaaagactactttaagaatcgtgcgaattgtttcagtgcagatgatatttcgtctagttcatgtcaccgtatcgtgaatgacaacgctgagattttcttttctaatgcgttggtgtatcgccgcatcgtaaagtccttgtcgaatgatgatatcaacaaaattagtggtgacatgaaagactccctgaaagaaatgtcattagaggagatttacagctacgaaaaatacggagagttcatcactcaggaaggtatctccttttacaacgatatttgcggcaaagttaatagtttcatgaatctgtattgtcagaagaataaggaaaacaagaatctgtacaagttacaaaagcttcataaacagatcttgtgcatcgccgacacgtcttatgaagtcccgtataaatttgaaagcgacgaagaagtatatcagagtgtgaatggattcttggacaatatctcatcaaaacacattgttgaacgtttgcgcaaaatcggcgacaactataacggatacaacttggataaaatttatatcgtatcaaaattttatgaatcagtatcccaaaagacttaccgtgattgggagactattaatacggcgttagaaatccattacaacaacattctgccgggtaacggtaaatcgaaagcggacaaagtgaagaaggcggttaagaacgatcttcagaagtctatcacggagattaatgagctggtttccaattacaagttgtgctcggatgataacatcaaagctgaaacctatatccatgaaatttctcatattcttaataacttcgaggcacaagaattaaaatataacccagaaattcatctggttgagagcgaacttaaagcttcagaattaaaaaatgttttggacgtaattatgaacgccttccattggtgcagcgtgtttatgacagaggagttagtagataaggataacaacttttatgcagaattggaagagatctatgatgagatctatccagtgatttcactgtataacttagtccgtaattacgtcactcagaagccgctgtcaactaaaaagatcaagttaaattttggaattccgacattggcggatggttggagtaagtctaaggaatactcaaataacgctattatcttaatgcgtgacaacctgtattacttgggtattttcaatgccaaaaataagcccgataaaaaaatcattgaagggaatacttcagaaaataagggagattacaaaaaaatgatttataaccttttgccaggcccaaacaaaatgatccccaaggtgtttttgagtagtaagacgggagtagaaacatataagccatcagcgtacattcttgaagggtacaaacaaaataaacacatcaagagcagcaaggactttgacattacattttgtcatgacttaatcgactactttaaaaattgcattgccattcaccctgagtggaaaaattttggtttcgacttcagtgatacctctacctatgaagatatctctggtttttatcgtgaggtagaacttcagggttacaagatcgattggacgtacatttccgagaaagacattgatcttttacaagagaagggtcagctttacttatttcagatctacaataaagacttttcgaaaaaatccacgggcaacgacaaccttcatacaatgtacttaaagaacctgttctctgaagaaaacttgaaagatatcgtgcttaaattgaatggcgaggccgagatttttttccgtaaaagctcgattaagaatcccatcatccacaagaaaggcagcattctggtaaatcgtacctatgaagcggaggaaaaggaccaatttggtaatattcagattgtccgtaagaacatccctgaaaatatctatcaagaattatataaatatttcaacgataagtcggacaaggaacttagcgatgaagccgcgaagttgaaaaatgttgttggtcaccacgaagcagcaacaaacattgtgaaagactatcgctacacttacgataagtactttttacatatgcctattacgattaactttaaggcaaataagacaggttttatcaacgaccgtatcctgcaatatattgcaaaagagaaggacctgcatgtcattgggattgatcgcggtgaacgcaatctgatttacgtgagtgttattgatacctgcggtaatattgttgagcaaaagtcttttaatatcgttaatggttacgactaccaaattaagcttaaacaacaggaaggtgcccgccagatcgcccgtaaggagtggaaggaaatcggaaaaattaaggaaatcaaagagggatatctgagcttggttattcatgaaatctcaaagatggttattaagtacaacgccatcatcgctatggaagacttatcgtatgggtttaaaaagggtcgtttcaaagttgagcgccaggtctaccaaaagtttgaaacgatgcttattaataaattaaactacttggttttcaaagatatctctattaccgagaatggaggtttactgaaaggataccagttaacgtatatccccgataagcttaaaaacgtgggccatcagtgtggctgtattttctatgtgcccgcggcatatacatcaaaaattgacccgacgacgggtttcgttaatatcttcaagttcaaagatctgacagttgatgcaaaacgcgaattcattaagaagttcgatagtattcgctatgactccgagaaaaatttgttttgcttcacttttgactacaataactttattactcagaatacagtcatgagtaaaagctcctggtcggtttacacgtacggggtacgcatcaaacgtcgttttgtgaatggtcgttttagtaatgagtcggatacaattgatattaccaaggatatggagaagactctggaaatgacagacatcaattggcgtgatggacatgatttgcgtcaggacattatcgactatgagattgtgcagcatattttcgaaatttttcgcctgacggtgcaaatgcgtaattccttaagcgaactggaagatcgcgactatgaccgcttaatttctcctgtgctgaatgagaacaacatcttctatgactcagcgaaagccggggacgctttgccaaaggatgcagatgctaacggtgcatattgtattgctctgaaaggcctttacgagatcaaacaaattactgaaaactggaaggaagatggaaagttttcccgtgataaattgaagatctctaataaggactggtttgactttatccaaaataaacgttattta

SEQ ID NO: 80 - protein, 1263 aa, synthetic construct
MNNGTNNFQNFIGISSLQKTLRNALIPTETTQQFIVKNGIIKEDELRGENRQILKDIMDDYYRGFISETLSSIDDIDWTSLFEKMEIQLKNGDNKDTLIKEQTEYRKAIHKKFANDDRFKNMFSAKLISDILPEFVIHNNNYSASEKEEKTQVIKLFSRFATSFKDYFKNRANCFSADDISSSSCHRIVNDNAEIFFSNALVYRRIVKSLSNDDINKISGDMKDSLKEMSLEEIYSYEKYGEFITQEGISFYNDICGKVNSFMNLYCQKNKENKNLYKLQKLHKQILCIADTSYEVPYKFESDEEVYQSVNGFLDNISSKHIVERLRKIGDNYNGYNLDKIYIVSKFYESVSQKTYRDWETINTALEIHYNNILPGNGKSKADKVKKAVKNDLQKSITEINELVSNYKLCSDDNIKAETYIHEISHILNNFEAQELKYNPEIHLVESELKASELKNVLDVIMNAFHWCSVFMTEELVDKDNNFYAELEEIYDEIYPVISLYNLVRNYVTQKPLSTKKIKLNFGIPTLADGWSKSKEYSNNAIILMRDNLYYLGIFNAKNKPDKKIIEGNTSENKGDYKKMIYNLLPGPNKMIPKVFLSSKTGVETYKPSAYILEGYKQNKHIKSSKDFDITFCHDLIDYFKNCIAIHPEWKNFGFDFSDTSTYEDISGFYREVELQGYKIDWTYISEKDIDLLQEKGQLYLFQIYNKDFSKKSTGNDNLHTMYLKNLFSEENLKDIVLKLNGEAEIFFRKSSIKNPIIHKKGSILVNRTYEAEEKDQFGNIQIVRKNIPENIYQELYKYFNDKSDKELSDEAAKLKNVVGHHEAATNIVKDYRYTYDKYFLHMPITINFKANKTGFINDRILQYIAKEKDLHVIGIDRGERNLIYVSVIDTCGNIVEQKSFNIVNGYDYQIKLKQQEGARQIARKEWKEIGKIKEIKEGYLSLVIHEISKMVIKYNAIIAMEDLSYGFKKGRFKVERQVYQKFETMLINKLNYLVFKDISITENGGLLKGYQLTYIPDKLKNVGHQCGCIFYVPAAYTSKIDPTTGFVNIFKFKDLTVDAKREFIKKFDSIRYDSEKNLFCFTFDYNNFITQNTVMSKSSWSVYTYGVRIKRRFVNGRFSNESDTIDITKDMEKTLEMTDINWRDGHDLRQDIIDYEIVQHIFEIFRLTVQMRNSLSELEDRDYDRLISPVLNENNIFYDSAKAGDALPKDADANGAYCIALKGLYEIKQITENWKEDGKFSRDKLKISNKDWFDFIQNKRYL

SEQ ID NO: 81 - DNA, 3789 bp, synthetic construct
  source 1..3789: mol_type = other DNA
atgaataacggtaccaataactttcaaaattttatcgggatctcctcgttgcaaaaaactcttcgtaatgctttaatcccgactgagacaacacagcagttcatcgttaaaaacggcatcattaaagaagatgagctgcgcggcgagaaccgtcagattttaaaggacatcatggacgactattaccgtgggttcatctcagaaacattaagcagcatcgatgatatcgactggacctcactgtttgagaagatggagattcaacttaagaatggagacaacaaagacactttaattaaggagcagacggaatatcgtaaagctatccataaaaaatttgcaaacgatgaccgtttcaaaaatatgttttccgcaaaattgattagcgacattttacctgaattcgtaatccataacaacaactattccgcatctgaaaaagaggagaagacccaagttatcaaacttttttcacgtttcgcgacatcttttaaagactactttaagaatcgtgcgaattgtttcagtgcagatgatatttcgtctagttcatgtcaccgtatcgtgaatgacaacgctgagattttcttttctaatgcgttggtgtatcgccgcatcgtaaagtccttgtcgaatgatgatatcaacaaaattagtggtgacatgaaagactccctgaaagaaatgtcattagaggagatttacagctacgaaaaatacggagagttcatcactcaggaaggtatctccttttacaacgatatttgcggcaaagttaatagtttcatgaatctgtattgtcagaagaataaggaaaacaagaatctgtacaagttacaaaagcttcataaacagatcttgtgcatcgccgacacgtcttatgaagtcccgtataaatttgaaagcgacgaagaagtatatcagagtgtgaatggattcttggacaatatctcatcaaaacacattgttgaacgtttgcgcaaaatcggcgacaactataacggatacaacttggataaaatttatatcgtatcaaaattttatgaatcagtatcccaaaagacttaccgtgattgggagactattaatacggcgttagaaatccattacaacaacattctgccgggtaacggtaaatcgaaagcggacaaagtgaagaaggcggttaagaacgatcttcagaagtctatcacggagattaatgagctggtttccaattacaagttgtgctcggatgataacatcaaagctgaaacctatatccatgaaatttctcatattcttaataacttcgaggcacaagaattaaaatataacccagaaattcatctggttgagagcgaacttaaagcttcagaattaaaaaatgttttggacgtaattatgaacgccttccattggtgcagcgtgtttatgacagaggagttagtagataaggataacaacttttatgcagaattggaagagatctatgatgagatctatccagtgatttcactgtataacttagtccgtaattacgtcactcagaagccgggctcaactaaaaagatcaagttaaattttggaattccgacattggcggatggttggagtaagtctaaggaatactcaaataacgctattatcttaatgcgtgacaacctgtattacttgggtattttcaatgccaaaaataagcccgataaaaaaatcattgaagggaatacttcagaaaataagggagattacaaaaaaatgatttataaccttttgccaggcccaaacaaaatgatccccaaggtgtttttgagtagtaagacgggagtagaaacatataagccatcagcgtacattcttgaagggtacaaacaaaataaacacatcaagagcagcaaggactttgacattacattttgtcatgacttaatcgactactttaaaaattgcattgccattcaccctgagtggaaaaattttggtttcgacttcagtgatacctctacctatgaagatatctctggtttttatcgtgaggtagaacttcagggttacaagatcgattggacgtacatttccgagaaagacattgatcttttacaagagaagggtcagctttacttatttcagatctacaataaagacttttcgaaaaaatccacgggcaacgacaaccttcatacaatgtacttaaagaacctgttctctgaagaaaacttgaaagatatcgtgcttaaattgaatggcgaggccgagatttttttccgtaaaagctcgattaagaatcccatcatccacaagaaaggcagcattctggtaaatcgtacctatgaagcggaggaaaaggaccaatttggtaatattcagattgtccgtaagaacatccctgaaaatatctatcaagaattatataaatatttcaacgataagtcggacaaggaacttagcgatgaagccgcgaagttgaaaaatgttgttggtcaccacgaagcagcaacaaacattgtgaaagactatcgctacacttacgataagtactttttacatatgcctattacgattaactttaaggcaaataagacaggttttatcaacgaccgtatcctgcaatatattgcaaaagagaaggacctgcatgtcattgggattgatcgcggtgaacgcaatctgatttacgtgagtgttattgatacctgcggtaatattgttgagcaaaagtcttttaatatcgttaatggttacgactaccaaattaagcttaaacaacaggaaggtgcccgccagatcgcccgtaaggagtggaaggaaatcggaaaaattaaggaaatcaaagagggatatctgagcttggttattcatgaaatctcaaagatggttattaagtacaacgccatcatcgctatggaagacttatcgtatgggtttaaaaagggtcgtttcaaagttgagcgccaggtctaccaaaagtttgaaacgatgcttattaataaattaaactacttggttttcaaagatatctctattaccgagaatggaggtttactgaaaggataccagttaacgtatatccccgataagcttaaaaacgtgggccatcagtgtggctgtattttctatgtgcccgcggcatatacatcaaaaattgacccgacgacgggtttcgttaatatcttcaagttcaaagatctgacagttgatgcaaaacgcgaattcattaagaagttcgatagtattcgctatgactccgagaaaaatttgttttgcttcacttttgactacaataactttattactcagaatacagtcatgagtaaaagctcctggtcggtttacacgtacggggtacgcatcaaacgtcgttttgtgaatggtcgttttagtaatgagtcggatacaattgatattaccaaggatatggagaagactctggaaatgacagacatcaattggcgtgatggacatgatttgcgtcaggacattatcgactatgagattgtgcagcatattttcgaaatttttcgcctgacggtgcaaatgcgtaattccttaagcgaactggaagatcgcgactatgaccgcttaatttctcctgtgctgaatgagaacaacatcttctatgactcagcgaaagccggggacgctttgccaaaggatgcagatgctaacggtgcatattgtattgctctgaaaggcctttacgagatcaaacaaattactgaaaactggaaggaagatggaaagttttcccgtgataaattgaagatctctaataaggactggtttgactttatccaaaataaacgttattta

SEQ ID NO: 82 - protein, 1263 aa, synthetic construct
MNNGTNNFQNFIGISSLQKTLRNALIPTETTQQFIVKNGIIKEDELRGENRQILKDIMDDYYRGFISETLSSIDDIDWTSLFEKMEIQLKNGDNKDTLIKEQTEYRKAIHKKFANDDRFKNMFSAKLISDILPEFVIHNNNYSASEKEEKTQVIKLFSRFATSFKDYFKNRANCFSADDISSSSCHRIVNDNAEIFFSNALVYRRIVKSLSNDDINKISGDMKDSLKEMSLEEIYSYEKYGEFITQEGISFYNDICGKVNSFMNLYCQKNKENKNLYKLQKLHKQILCIADTSYEVPYKFESDEEVYQSVNGFLDNISSKHIVERLRKIGDNYNGYNLDKIYIVSKFYESVSQKTYRDWETINTALEIHYNNILPGNGKSKADKVKKAVKNDLQKSITEINELVSNYKLCSDDNIKAETYIHEISHILNNFEAQELKYNPEIHLVESELKASELKNVLDVIMNAFHWCSVFMTEELVDKDNNFYAELEEIYDEIYPVISLYNLVRNYVTQKPGSTKKIKLNFGIPTLADGWSKSKEYSNNAIILMRDNLYYLGIFNAKNKPDKKIIEGNTSENKGDYKKMIYNLLPGPNKMIPKVFLSSKTGVETYKPSAYILEGYKQNKHIKSSKDFDITFCHDLIDYFKNCIAIHPEWKNFGFDFSDTSTYEDISGFYREVELQGYKIDWTYISEKDIDLLQEKGQLYLFQIYNKDFSKKSTGNDNLHTMYLKNLFSEENLKDIVLKLNGEAEIFFRKSSIKNPIIHKKGSILVNRTYEAEEKDQFGNIQIVRKNIPENIYQELYKYFNDKSDKELSDEAAKLKNVVGHHEAATNIVKDYRYTYDKYFLHMPITINFKANKTGFINDRILQYIAKEKDLHVIGIDRGERNLIYVSVIDTCGNIVEQKSFNIVNGYDYQIKLKQQEGARQIARKEWKEIGKIKEIKEGYLSLVIHEISKMVIKYNAIIAMEDLSYGFKKGRFKVERQVYQKFETMLINKLNYLVFKDISITENGGLLKGYQLTYIPDKLKNVGHQCGCIFYVPAAYTSKIDPTTGFVNIFKFKDLTVDAKREFIKKFDSIRYDSEKNLFCFTFDYNNFITQNTVMSKSSWSVYTYGVRIKRRFVNGRFSNESDTIDITKDMEKTLEMTDINWRDGHDLRQDIIDYEIVQHIFEIFRLTVQMRNSLSELEDRDYDRLISPVLNENNIFYDSAKAGDALPKDADANGAYCIALKGLYEIKQITENWKEDGKFSRDKLKISNKDWFDFIQNKRYL

SEQ ID NO: 83 - DNA, 3789 bp, synthetic construct
  source 1..3789: mol_type = other DNA
atgaataacggtaccaataactttcaaaattttatcgggatctcctcgttgcaaaaaactcttcgtaatgctttaatcccgactgagacaacacagcagttcatcgttaaaaacggcatcattaaagaagatgagctgcgcggcgagaaccgtcagattttaaaggacatcatggacgactattaccgtgggttcatctcagaaacattaagcagcatcgatgatatcgactggacctcactgtttgagaagatggagattcaacttaagaatggagacaacaaagacactttaattaaggagcagacggaatatcgtaaagctatccataaaaaatttgcaaacgatgaccgtttcaaaaatatgttttccgcaaaattgattagcgacattttacctgaattcgtaatccataacaacaactattccgcatctgaaaaagaggagaagacccaagttatcaaacttttttcacgtttcgcgacatcttttaaagactactttaagaatcgtgcgaattgtttcagtgcagatgatatttcgtctagttcatgtcaccgtatcgtgaatgacaacgctgagattttcttttctaatgcgttggtgtatcgccgcatcgtaaagtccttgtcgaatgatgatatcaacaaaattagtggtgacatgaaagactccctgaaagaaatgtcattagaggagatttacagctacgaaaaatacggagagttcatcactcaggaaggtatctccttttacaacgatatttgcggcaaagttaatagtttcatgaatctgtattgtcagaagaataaggaaaacaagaatctgtacaagttacaaaagcttcataaacagatcttgtgcatcgccgacacgtcttatgaagtcccgtataaatttgaaagcgacgaagaagtatatcagagtgtgaatggattcttggacaatatctcatcaaaacacattgttgaacgtttgcgcaaaatcggcgacaactataacggatacaacttggataaaatttatatcgtatcaaaattttatgaatcagtatcccaaaagacttaccgtgattgggagactattaatacggcgttagaaatccattacaacaacattctgccgggtaacggtaaatcgaaagcggacaaagtgaagaaggcggttaagaacgatcttcagaagtctatcacggagattaatgagctggtttccaattacaagttgtgctcggatgataacatcaaagctgaaacctatatccatgaaatttctcatattcttaataacttcgaggcacaagaattaaaatataacccagaaattcatctggttgagagcgaacttaaagcttcagaattaaaaaatgttttggacgtaattatgaacgccttccattggtgcagcgtgtttatgacagaggagttagtagataaggataacaacttttatgcagaattggaagagatctatgatgagatctatccagtgatttcactgtataacttagtccgtaattacgtcactcagaagccgtaccgtactaaaaagatcaagttaaattttggaattccgacattggcggatggttggagtaagtctaaggaatactcaaataacgctattatcttaatgcgtgacaacctgtattacttgggtattttcaatgccaaaaataagcccgataaaaaaatcattgaagggaatacttcagaaaataagggagattacaaaaaaatgatttataaccttttgccaggcccaaacaaaatgatccccaaggtgtttttgagtagtaagacgggagtagaaacatataagccatcagcgtacattcttgaagggtacaaacaaaataaacacatcaagagcagcaaggactttgacattacattttgtcatgacttaatcgactactttaaaaattgcattgccattcaccctgagtggaaaaattttggtttcgacttcagtgatacctctacctatgaagatatctctggtttttatcgtgaggtagaacttcagggttacaagatcgattggacgtacatttccgagaaagacattgatcttttacaagagaagggtcagctttacttatttcagatctacaataaagacttttcgaaaaaatccacgggcaacgacaaccttcatacaatgtacttaaagaacctgttctctgaagaaaacttgaaagatatcgtgcttaaattgaatggcgaggccgagatttttttccgtaaaagctcgattaagaatcccatcatccacaagaaaggcagcattctggtaaatcgtacctatgaagcggaggaaaaggaccaatttggtaatattcagattgtccgtaagaacatccctgaaaatatctatcaagaattatataaatatttcaacgataagtcggacaaggaacttagcgatgaagccgcgaagttgaaaaatgttgttggtcaccacgaagcagcaacaaacattgtgaaagactatcgctacacttacgataagtactttttacatatgcctattacgattaactttaaggcaaataagacaggttttatcaacgaccgtatcctgcaatatattgcaaaagagaaggacctgcatgtcattgggattgatcgcggtgaacgcaatctgatttacgtgagtgttattgatacctgcggtaatattgttgagcaaaagtcttttaatatcgttaatggttacgactaccaaattaagcttaaacaacaggaaggtgcccgccagatcgcccgtaaggagtggaaggaaatcggaaaaattaaggaaatcaaagagggatatctgagcttggttattcatgaaatctcaaagatggttattaagtacaacgccatcatcgctatggaagacttatcgtatgggtttaaaaagggtcgtttcaaagttgagcgccaggtctaccaaaagtttgaaacgatgcttattaataaattaaactacttggttttcaaagatatctctattaccgagaatggaggtttactgaaaggataccagttaacgtatatccccgataagcttaaaaacgtgggccatcagtgtggctgtattttctatgtgcccgcggcatatacatcaaaaattgacccgacgacgggtttcgttaatatcttcaagttcaaagatctgacagttgatgcaaaacgcgaattcattaagaagttcgatagtattcgctatgactccgagaaaaatttgttttgcttcacttttgactacaataactttattactcagaatacagtcatgagtaaaagctcctggtcggtttacacgtacggggtacgcatcaaacgtcgttttgtgaatggtcgttttagtaatgagtcggatacaattgatattaccaaggatatggagaagactctggaaatgacagacatcaattggcgtgatggacatgatttgcgtcaggacattatcgactatgagattgtgcagcatattttcgaaatttttcgcctgacggtgcaaatgcgtaattccttaagcgaactggaagatcgcgactatgaccgcttaatttctcctgtgctgaatgagaacaacatcttctatgactcagcgaaagccggggacgctttgccaaaggatgcagatgctaacggtgcatattgtattgctctgaaaggcctttacgagatcaaacaaattactgaaaactggaaggaagatggaaagttttcccgtgataaattgaagatctctaataaggactggtttgactttatccaaaataaacgttattta

SEQ ID NO: 84 - protein, 1263 aa, synthetic construct
MNNGTNNFQNFIGISSLQKTLRNALIPTETTQQFIVKNGIIKEDELRGENRQILKDIMDDYYRGFISETLSSIDDIDWTSLFEKMEIQLKNGDNKDTLIKEQTEYRKAIHKKFANDDRFKNMFSAKLISDILPEFVIHNNNYSASEKEEKTQVIKLFSRFATSFKDYFKNRANCFSADDISSSSCHRIVNDNAEIFFSNALVYRRIVKSLSNDDINKISGDMKDSLKEMSLEEIYSYEKYGEFITQEGISFYNDICGKVNSFMNLYCQKNKENKNLYKLQKLHKQILCIADTSYEVPYKFESDEEVYQSVNGFLDNISSKHIVERLRKIGDNYNGYNLDKIYIVSKFYESVSQKTYRDWETINTALEIHYNNILPGNGKSKADKVKKAVKNDLQKSITEINELVSNYKLCSDDNIKAETYIHEISHILNNFEAQELKYNPEIHLVESELKASELKNVLDVIMNAFHWCSVFMTEELVDKDNNFYAELEEIYDEIYPVISLYNLVRNYVTQKPYRTKKIKLNFGIPTLADGWSKSKEYSNNAIILMRDNLYYLGIFNAKNKPDKKIIEGNTSENKGDYKKMIYNLLPGPNKMIPKVFLSSKTGVETYKPSAYILEGYKQNKHIKSSKDFDITFCHDLIDYFKNCIAIHPEWKNFGFDFSDTSTYEDISGFYREVELQGYKIDWTYISEKDIDLLQEKGQLYLFQIYNKDFSKKSTGNDNLHTMYLKNLFSEENLKDIVLKLNGEAEIFFRKSSIKNPIIHKKGSILVNRTYEAEEKDQFGNIQIVRKNIPENIYQELYKYFNDKSDKELSDEAAKLKNVVGHHEAATNIVKDYRYTYDKYFLHMPITINFKANKTGFINDRILQYIAKEKDLHVIGIDRGERNLIYVSVIDTCGNIVEQKSFNIVNGYDYQIKLKQQEGARQIARKEWKEIGKIKEIKEGYLSLVIHEISKMVIKYNAIIAMEDLSYGFKKGRFKVERQVYQKFETMLINKLNYLVFKDISITENGGLLKGYQLTYIPDKLKNVGHQCGCIFYVPAAYTSKIDPTTGFVNIFKFKDLTVDAKREFIKKFDSIRYDSEKNLFCFTFDYNNFITQNTVMSKSSWSVYTYGVRIKRRFVNGRFSNESDTIDITKDMEKTLEMTDINWRDGHDLRQDIIDYEIVQHIFEIFRLTVQMRNSLSELEDRDYDRLISPVLNENNIFYDSAKAGDALPKDADANGAYCIALKGLYEIKQITENWKEDGKFSRDKLKISNKDWFDFIQNKRYL

SEQ ID NO: 85 - DNA, 3789 bp, synthetic construct
  source 1..3789: mol_type = other DNA
atgaataacggtaccaataactttcaaaattttatcgggatctcctcgttgcaaaaaactcttcgtaatgctttaatcccgactgagacaacacagcagttcatcgttaaaaacggcatcattaaagaagatgagctgcgcggcgagaaccgtcagattttaaaggacatcatggacgactattaccgtgggttcatctcagaaacattaagcagcatcgatgatatcgactggacctcactgtttgagaagatggagattcaacttaagaatggagacaacaaagacactttaattaaggagcagacggaatatcgtaaagctatccataaaaaatttgcaaacgatgaccgtttcaaaaatatgttttccgcaaaattgattagcgacattttacctgaattcgtaatccataacaacaactattccgcatctgaaaaagaggagaagacccaagttatcaaacttttttcacgtttcgcgacatcttttaaagactactttaagaatcgtgcgaattgtttcagtgcagatgatatttcgtctagttcatgtcaccgtatcgtgaatgacaacgctgagattttcttttctaatgcgttggtgtatcgccgcatcgtaaagtccttgtcgaatgatgatatcaacaaaattagtggtgacatgaaagactccctgaaagaaatgtcattagaggagatttacagctacgaaaaatacggagagttcatcactcaggaaggtatctccttttacaacgatatttgcggcaaagttaatagtttcatgaatctgtattgtcagaagaataaggaaaacaagaatctgtacaagttacaaaagcttcataaacagatcttgtgcatcgccgacacgtcttatgaagtcccgtataaatttgaaagcgacgaagaagtatatcagagtgtgaatggattcttggacaatatctcatcaaaacacattgttgaacgtttgcgcaaaatcggcgacaactataacggatacaacttggataaaatttatatcgtatcaaaattttatgaatcagtatcccaaaagacttaccgtgattgggagactattaatacggcgttagaaatccattacaacaacattctgccgggtaacggtaaatcgaaagcggacaaagtgaagaaggcggttaagaacgatcttcagaagtctatcacggagattaatgagctggtttccaattacaagttgtgctcggatgataacatcaaagctgaaacctatatccatgaaatttctcatattcttaataacttcgaggcacaagaattaaaatataacccagaaattcatctggttgagagcgaacttaaagcttcagaattaaaaaatgttttggacgtaattatgaacgccttccattggtgcagcgtgtttatgacagaggagttagtagataaggataacaacttttatgcagaattggaagagatctatgatgagatctatccagtgatttcactgtataacttagtccgtaattacgtcactcagaagccgtacccgactaaaaagatcaagttaaattttggaattccgacattggcggatggttggagtaagtctaaggaatactcaaataacgctattatcttaatgcgtgacaacctgtattacttgggtattttcaatgccaaaaataagcccgataaaaaaatcattgaagggaatacttcagaaaataagggagattacaaaaaaatgatttataaccttttgccaggcccaaacaaaatgatccccaaggtgtttttgagtagtaagacgggagtagaaacatataagccatcagcgtacattcttgaagggtacaaacaaaataaacacatcaagagcagcaaggactttgacattacattttgtcatgacttaatcgactactttaaaaattgcattgccattcaccctgagtggaaaaattttggtttcgacttcagtgatacctctacctatgaagatatctctggtttttatcgtgaggtagaacttcagggttacaagatcgattggacgtacatttccgagaaagacattgatcttttacaagagaagggtcagctttacttatttcagatctacaataaagacttttcgaaaaaatccacgggcaacgacaaccttcatacaatgtacttaaagaacctgttctctgaagaaaacttgaaagatatcgtgcttaaattgaatggcgaggccgagatttttttccgtaaaagctcgattaagaatcccatcatccacaagaaaggcagcattctggtaaatcgtacctatgaagcggaggaaaaggaccaatttggtaatattcagattgtccgtaagaacatccctgaaaatatctatcaagaattatataaatatttcaacgataagtcggacaaggaacttagcgatgaagccgcgaagttgaaaaatgttgttggtcaccacgaagcagcaacaaacattgtgaaagactatcgctacacttacgataagtactttttacatatgcctattacgattaactttaaggcaaataagacaggttttatcaacgaccgtatcctgcaatatattgcaaaagagaaggacctgcatgtcattgggattgatcgcggtgaacgcaatctgatttacgtgagtgttattgatacctgcggtaatattgttgagcaaaagtcttttaatatcgttaatggttacgactaccaaattaagcttaaacaacaggaaggtgcccgccagatcgcccgtaaggagtggaaggaaatcggaaaaattaaggaaatcaaagagggatatctgagcttggttattcatgaaatctcaaagatggttattaagtacaacgccatcatcgctatggaagacttatcgtatgggtttaaaaagggtcgtttcaaagttgagcgccaggtctaccaaaagtttgaaacgatgcttattaataaattaaactacttggttttcaaagatatctctattaccgagaatggaggtttactgaaaggataccagttaacgtatatccccgataagcttaaaaacgtgggccatcagtgtggctgtattttctatgtgcccgcggcatatacatcaaaaattgacccgacgacgggtttcgttaatatcttcaagttcaaagatctgacagttgatgcaaaacgcgaattcattaagaagttcgatagtattcgctatgactccgagaaaaatttgttttgcttcacttttgactacaataactttattactcagaatacagtcatgagtaaaagctcctggtcggtttacacgtacggggtacgcatcaaacgtcgttttgtgaatggtcgttttagtaatgagtcggatacaattgatattaccaaggatatggagaagactctggaaatgacagacatcaattggcgtgatggacatgatttgcgtcaggacattatcgactatgagattgtgcagcatattttcgaaatttttcgcctgacggtgcaaatgcgtaattccttaagcgaactggaagatcgcgactatgaccgcttaatttctcctgtgctgaatgagaacaacatcttctatgactcagcgaaagccggggacgctttgccaaaggatgcagatgctaacggtgcatattgtattgctctgaaaggcctttacgagatcaaacaaattactgaaaactggaaggaagatggaaagttttcccgtgataaattgaagatctctaataaggactggtttgactttatccaaaataaacgttattta

SEQ ID NO: 86 - protein, 1263 aa, synthetic construct
MNNGTNNFQNFIGISSLQKTLRNALIPTETTQQFIVKNGIIKEDELRGENRQILKDIMDDYYRGFISETLSSIDDIDWTSLFEKMEIQLKNGDNKDTLIKEQTEYRKAIHKKFANDDRFKNMFSAKLISDILPEFVIHNNNYSASEKEEKTQVIKLFSRFATSFKDYFKNRANCFSADDISSSSCHRIVNDNAEIFFSNALVYRRIVKSLSNDDINKISGDMKDSLKEMSLEEIYSYEKYGEFITQEGISFYNDICGKVNSFMNLYCQKNKENKNLYKLQKLHKQILCIADTSYEVPYKFESDEEVYQSVNGFLDNISSKHIVERLRKIGDNYNGYNLDKIYIVSKFYESVSQKTYRDWETINTALEIHYNNILPGNGKSKADKVKKAVKNDLQKSITEINELVSNYKLCSDDNIKAETYIHEISHILNNFEAQELKYNPEIHLVESELKASELKNVLDVIMNAFHWCSVFMTEELVDKDNNFYAELEEIYDEIYPVISLYNLVRNYVTQKPYPTKKIKLNFGIPTLADGWSKSKEYSNNAIILMRDNLYYLGIFNAKNKPDKKIIEGNTSENKGDYKKMIYNLLPGPNKMIPKVFLSSKTGVETYKPSAYILEGYKQNKHIKSSKDFDITFCHDLIDYFKNCIAIHPEWKNFGFDFSDTSTYEDISGFYREVELQGYKIDWTYISEKDIDLLQEKGQLYLFQIYNKDFSKKSTGNDNLHTMYLKNLFSEENLKDIVLKLNGEAEIFFRKSSIKNPIIHKKGSILVNRTYEAEEKDQFGNIQIVRKNIPENIYQELYKYFNDKSDKELSDEAAKLKNVVGHHEAATNIVKDYRYTYDKYFLHMPITINFKANKTGFINDRILQYIAKEKDLHVIGIDRGERNLIYVSVIDTCGNIVEQKSFNIVNGYDYQIKLKQQEGARQIARKEWKEIGKIKEIKEGYLSLVIHEISKMVIKYNAIIAMEDLSYGFKKGRFKVERQVYQKFETMLINKLNYLVFKDISITENGGLLKGYQLTYIPDKLKNVGHQCGCIFYVPAAYTSKIDPTTGFVNIFKFKDLTVDAKREFIKKFDSIRYDSEKNLFCFTFDYNNFITQNTVMSKSSWSVYTYGVRIKRRFVNGRFSNESDTIDITKDMEKTLEMTDINWRDGHDLRQDIIDYEIVQHIFEIFRLTVQMRNSLSELEDRDYDRLISPVLNENNIFYDSAKAGDALPKDADANGAYCIALKGLYEIKQITENWKEDGKFSRDKLKISNKDWFDFIQNKRYL

SEQ ID NO: 87 - DNA, 3789 bp, synthetic construct
  source 1..3789: mol_type = other DNA
atgaataacggtaccaataactttcaaaattttatcgggatctcctcgttgcaaaaaactcttcgtaatgctttaatcccgactgagacaacacagcagttcatcgttaaaaacggcatcattaaagaagatgagctgcgcggcgagaaccgtcagattttaaaggacatcatggacgactattaccgtgggttcatctcagaaacattaagcagcatcgatgatatcgactggacctcactgtttgagaagatggagattcaacttaagaatggagacaacaaagacactttaattaaggagcagacggaatatcgtaaagctatccataaaaaatttgcaaacgatgaccgtttcaaaaatatgttttccgcaaaattgattagcgacattttacctgaattcgtaatccataacaacaactattccgcatctgaaaaagaggagaagacccaagttatcaaacttttttcacgtttcgcgacatcttttaaagactactttaagaatcgtgcgaattgtttcagtgcagatgatatttcgtctagttcatgtcaccgtatcgtgaatgacaacgctgagattttcttttctaatgcgttggtgtatcgccgcatcgtaaagtccttgtcgaatgatgatatcaacaaaattagtggtgacatgaaagactccctgaaagaaatgtcattagaggagatttacagctacgaaaaatacggagagttcatcactcaggaaggtatctccttttacaacgatatttgcggcaaagttaatagtttcatgaatctgtattgtcagaagaataaggaaaacaagaatctgtacaagttacaaaagcttcataaacagatcttgtgcatcgccgacacgtcttatgaagtcccgtataaatttgaaagcgacgaagaagtatatcagagtgtgaatggattcttggacaatatctcatcaaaacacattgttgaacgtttgcgcaaaatcggcgacaactataacggatacaacttggataaaatttatatcgtatcaaaattttatgaatcagtatcccaaaagacttaccgtgattgggagactattaatacggcgttagaaatccattacaacaacattctgccgggtaacggtaaatcgaaagcggacaaagtgaagaaggcggttaagaacgatcttcagaagtctatcacggagattaatgagctggtttccaattacaagttgtgctcggatgataacatcaaagctgaaacctatatccatgaaatttctcatattcttaataacttcgaggcacaagaattaaaatataacccagaaattcatctggttgagagcgaacttaaagcttcagaattaaaaaatgttttggacgtaattatgaacgccttccattggtgcagcgtgtttatgacagaggagttagtagataaggataacaacttttatgcagaattggaagagatctatgatgagatctatccagtgatttcactgtataacttagtccgtaattacgtcactcagaagccgtactcaccgaaaaagatcaagttaaattttggaattccgacattggcggatggttggagtaagtctaaggaatactcaaataacgctattatcttaatgcgtgacaacctgtattacttgggtattttcaatgccaaaaataagcccgataaaaaaatcattgaagggaatacttcagaaaataagggagattacaaaaaaatgatttataaccttttgccaggcccaaacaaaatgatccccaaggtgtttttgagtagtaagacgggagtagaaacatataagccatcagcgtacattcttgaagggtacaaacaaaataaacacatcaagagcagcaaggactttgacattacattttgtcatgacttaatcgactactttaaaaattgcattgccattcaccctgagtggaaaaattttggtttcgacttcagtgatacctctacctatgaagatatctctggtttttatcgtgaggtagaacttcagggttacaagatcgattggacgtacatttccgagaaagacattgatcttttacaagagaagggtcagctttacttatttcagatctacaataaagacttttcgaaaaaatccacgggcaacgacaaccttcatacaatgtacttaaagaacctgttctctgaagaaaacttgaaagatatcgtgcttaaattgaatggcgaggccgagatttttttccgtaaaagctcgattaagaatcccatcatccacaagaaaggcagcattctggtaaatcgtacctatgaagcggaggaaaaggaccaatttggtaatattcagattgtccgtaagaacatccctgaaaatatctatcaagaattatataaatatttcaacgataagtcggacaaggaacttagcgatgaagccgcgaagttgaaaaatgttgttggtcaccacgaagcagcaacaaacattgtgaaagactatcgctacacttacgataagtactttttacatatgcctattacgattaactttaaggcaaataagacaggttttatcaacgaccgtatcctgcaatatattgcaaaagagaaggacctgcatgtcattgggattgatcgcggtgaacgcaatctgatttacgtgagtgttattgatacctgcggtaatattgttgagcaaaagtcttttaatatcgttaatggttacgactaccaaattaagcttaaacaacaggaaggtgcccgccagatcgcccgtaaggagtggaaggaaatcggaaaaattaaggaaatcaaagagggatatctgagcttggttattcatgaaatctcaaagatggttattaagtacaacgccatcatcgctatggaagacttatcgtatgggtttaaaaagggtcgtttcaaagttgagcgccaggtctaccaaaagtttgaaacgatgcttattaataaattaaactacttggttttcaaagatatctctattaccgagaatggaggtttactgaaaggataccagttaacgtatatccccgataagcttaaaaacgtgggccatcagtgtggctgtattttctatgtgcccgcggcatatacatcaaaaattgacccgacgacgggtttcgttaatatcttcaagttcaaagatctgacagttgatgcaaaacgcgaattcattaagaagttcgatagtattcgctatgactccgagaaaaatttgttttgcttcacttttgactacaataactttattactcagaatacagtcatgagtaaaagctcctggtcggtttacacgtacggggtacgcatcaaacgtcgttttgtgaatggtcgttttagtaatgagtcggatacaattgatattaccaaggatatggagaagactctggaaatgacagacatcaattggcgtgatggacatgatttgcgtcaggacattatcgactatgagattgtgcagcatattttcgaaatttttcgcctgacggtgcaaatgcgtaattccttaagcgaactggaagatcgcgactatgaccgcttaatttctcctgtgctgaatgagaacaacatcttctatgactcagcgaaagccggggacgctttgccaaaggatgcagatgctaacggtgcatattgtattgctctgaaaggcctttacgagatcaaacaaattactgaaaactggaaggaagatggaaagttttcccgtgataaattgaagatctctaataaggactggtttgactttatccaaaataaacgttattta

SEQ ID NO: 88 - protein, 1263 aa, synthetic construct
MNNGTNNFQNFIGISSLQKTLRNALIPTETTQQFIVKNGIIKEDELRGENRQILKDIMDDYYRGFISETLSSIDDIDWTSLFEKMEIQLKNGDNKDTLIKEQTEYRKAIHKKFANDDRFKNMFSAKLISDILPEFVIHNNNYSASEKEEKTQVIKLFSRFATSFKDYFKNRANCFSADDISSSSCHRIVNDNAEIFFSNALVYRRIVKSLSNDDINKISGDMKDSLKEMSLEEIYSYEKYGEFITQEGISFYNDICGKVNSFMNLYCQKNKENKNLYKLQKLHKQILCIADTSYEVPYKFESDEEVYQSVNGFLDNISSKHIVERLRKIGDNYNGYNLDKIYIVSKFYESVSQKTYRDWETINTALEIHYNNILPGNGKSKADKVKKAVKNDLQKSITEINELVSNYKLCSDDNIKAETYIHEISHILNNFEAQELKYNPEIHLVESELKASELKNVLDVIMNAFHWCSVFMTEELVDKDNNFYAELEEIYDEIYPVISLYNLVRNYVTQKPYSPKKIKLNFGIPTLADGWSKSKEYSNNAIILMRDNLYYLGIFNAKNKPDKKIIEGNTSENKGDYKKMIYNLLPGPNKMIPKVFLSSKTGVETYKPSAYILEGYKQNKHIKSSKDFDITFCHDLIDYFKNCIAIHPEWKNFGFDFSDTSTYEDISGFYREVELQGYKIDWTYISEKDIDLLQEKGQLYLFQIYNKDFSKKSTGNDNLHTMYLKNLFSEENLKDIVLKLNGEAEIFFRKSSIKNPIIHKKGSILVNRTYEAEEKDQFGNIQIVRKNIPENIYQELYKYFNDKSDKELSDEAAKLKNVVGHHEAATNIVKDYRYTYDKYFLHMPITINFKANKTGFINDRILQYIAKEKDLHVIGIDRGERNLIYVSVIDTCGNIVEQKSFNIVNGYDYQIKLKQQEGARQIARKEWKEIGKIKEIKEGYLSLVIHEISKMVIKYNAIIAMEDLSYGFKKGRFKVERQVYQKFETMLINKLNYLVFKDISITENGGLLKGYQLTYIPDKLKNVGHQCGCIFYVPAAYTSKIDPTTGFVNIFKFKDLTVDAKREFIKKFDSIRYDSEKNLFCFTFDYNNFITQNTVMSKSSWSVYTYGVRIKRRFVNGRFSNESDTIDITKDMEKTLEMTDINWRDGHDLRQDIIDYEIVQHIFEIFRLTVQMRNSLSELEDRDYDRLISPVLNENNIFYDSAKAGDALPKDADANGAYCIALKGLYEIKQITENWKEDGKFSRDKLKISNKDWFDFIQNKRYL

SEQ ID NO: 89 - DNA, 3789 bp, synthetic construct
  source 1..3789: mol_type = other DNA
atgaataacggtaccaataactttcaaaattttatcgggatctcctcgttgcaaaaaactcttcgtaatgctttaatcccgactgagacaacacagcagttcatcgttaaaaacggcatcattaaagaagatgagctgcgcggcgagaaccgtcagattttaaaggacatcatggacgactattaccgtgggttcatctcagaaacattaagcagcatcgatgatatcgactggacctcactgtttgagaagatggagattcaacttaagaatggagacaacaaagacactttaattaaggagcagacggaatatcgtaaagctatccataaaaaatttgcaaacgatgaccgtttcaaaaatatgttttccgcaaaattgattagcgacattttacctgaattcgtaatccataacaacaactattccgcatctgaaaaagaggagaagacccaagttatcaaacttttttcacgtttcgcgacatcttttaaagactactttaagaatcgtgcgaattgtttcagtgcagatgatatttcgtctagttcatgtcaccgtatcgtgaatgacaacgctgagattttcttttctaatgcgttggtgtatcgccgcatcgtaaagtccttgtcgaatgatgatatcaacaaaattagtggtgacatgaaagactccctgaaagaaatgtcattagaggagatttacagctacgaaaaatacggagagttcatcactcaggaaggtatctccttttacaacgatatttgcggcaaagttaatagtttcatgaatctgtattgtcagaagaataaggaaaacaagaatctgtacaagttacaaaagcttcataaacagatcttgtgcatcgccgacacgtcttatgaagtcccgtataaatttgaaagcgacgaagaagtatatcagagtgtgaatggattcttggacaatatctcatcaaaacacattgttgaacgtttgcgcaaaatcggcgacaactataacggatacaacttggataaaatttatatcgtatcaaaattttatgaatcagtatcccaaaagacttaccgtgattgggagactattaatacggcgttagaaatccattacaacaacattctgccgggtaacggtaaatcgaaagcggacaaagtgaagaaggcggttaagaacgatcttcagaagtctatcacggagattaatgagctggtttccaattacaagttgtgctcggatgataacatcaaagctgaaacctatatccatgaaatttctcatattcttaataacttcgaggcacaagaattaaaatataacccagaaattcatctggttgagagcgaacttaaagcttcagaattaaaaaatgttttggacgtaattatgaacgccttccattggtgcagcgtgtttatgacagaggagttagtagataaggataacaacttttatgcagaattggaagagatctatgatgagatctatccagtgatttcactgtataacttagtccgtaattacgtcactcagaagccgtactcaactcgtaagatcaagttaaattttggaattccgacattggcggatggttggagtaagtctaaggaatactcaaataacgctattatcttaatgcgtgacaacctgtattacttgggtattttcaatgccaaaaataagcccgataaaaaaatcattgaagggaatacttcagaaaataagggagattacaaaaaaatgatttataaccttttgccaggcccaaacaaaatgatccccaaggtgtttttgagtagtaagacgggagtagaaacatataagccatcagcgtacattcttgaagggtacaaacaaaataaacacatcaagagcagcaaggactttgacattacattttgtcatgacttaatcgactactttaaaaattgcattgccattcaccctgagtggaaaaattttggtttcgacttcagtgatacctctacctatgaagatatctctggtttttatcgtgaggtagaacttcagggttacaagatcgattggacgtacatttccgagaaagacattgatcttttacaagagaagggtcagctttacttatttcagatctacaataaagacttttcgaaaaaatccacgggcaacgacaaccttcatacaatgtacttaaagaacctgttctctgaagaaaacttgaaagatatcgtgcttaaattgaatggcgaggccgagatttttttccgtaaaagctcgattaagaatcccatcatccacaagaaaggcagcattctggtaaatcgtacctatgaagcggaggaaaaggaccaatttggtaatattcagattgtccgtaagaacatccctgaaaatatctatcaagaattatataaatatttcaacgataagtcggacaaggaacttagcgatgaagccgcgaagttgaaaaatgttgttggtcaccacgaagcagcaacaaacattgtgaaagactatcgctacacttacgataagtactttttacatatgcctattacgattaactttaaggcaaataagacaggttttatcaacgaccgtatcctgcaatatattgcaaaagagaaggacctgcatgtcattgggattgatcgcggtgaacgcaatctgatttacgtgagtgttattgatacctgcggtaatattgttgagcaaaagtcttttaatatcgttaatggttacgactaccaaattaagcttaaacaacaggaaggtgcccgccagatcgcccgtaaggagtggaaggaaatcggaaaaattaaggaaatcaaagagggatatctgagcttggttattcatgaaatctcaaagatggttattaagtacaacgccatcatcgctatggaagacttatcgtatgggtttaaaaagggtcgtttcaaagttgagcgccaggtctaccaaaagtttgaaacgatgcttattaataaattaaactacttggttttcaaagatatctctattaccgagaatggaggtttactgaaaggataccagttaacgtatatccccgataagcttaaaaacgtgggccatcagtgtggctgtattttctatgtgcccgcggcatatacatcaaaaattgacccgacgacgggtttcgttaatatcttcaagttcaaagatctgacagttgatgcaaaacgcgaattcattaagaagttcgatagtattcgctatgactccgagaaaaatttgttttgcttcacttttgactacaataactttattactcagaatacagtcatgagtaaaagctcctggtcggtttacacgtacggggtacgcatcaaacgtcgttttgtgaatggtcgttttagtaatgagtcggatacaattgatattaccaaggatatggagaagactctggaaatgacagacatcaattggcgtgatggacatgatttgcgtcaggacattatcgactatgagattgtgcagcatattttcgaaatttttcgcctgacggtgcaaatgcgtaattccttaagcgaactggaagatcgcgactatgaccgcttaatttctcctgtgctgaatgagaacaacatcttctatgactcagcgaaagccggggacgctttgccaaaggatgcagatgctaacggtgcatattgtattgctctgaaaggcctttacgagatcaaacaaattactgaaaactggaaggaagatggaaagttttcccgtgataaattgaagatctctaataaggactggtttgactttatccaaaataaacgttattta

SEQ ID NO: 90 - protein, 1263 aa, synthetic construct
MNNGTNNFQNFIGISSLQKTLRNALIPTETTQQFIVKNGIIKEDELRGENRQILKDIMDDYYRGFISETLSSIDDIDWTSLFEKMEIQLKNGDNKDTLIKEQTEYRKAIHKKFANDDRFKNMFSAKLISDILPEFVIHNNNYSASEKEEKTQVIKLFSRFATSFKDYFKNRANCFSADDISSSSCHRIVNDNAEIFFSNALVYRRIVKSLSNDDINKISGDMKDSLKEMSLEEIYSYEKYGEFITQEGISFYNDICGKVNSFMNLYCQKNKENKNLYKLQKLHKQILCIADTSYEVPYKFESDEEVYQSVNGFLDNISSKHIVERLRKIGDNYNGYNLDKIYIVSKFYESVSQKTYRDWETINTALEIHYNNILPGNGKSKADKVKKAVKNDLQKSITEINELVSNYKLCSDDNIKAETYIHEISHILNNFEAQELKYNPEIHLVESELKASELKNVLDVIMNAFHWCSVFMTEELVDKDNNFYAELEEIYDEIYPVISLYNLVRNYVTQKPYSTRKIKLNFGIPTLADGWSKSKEYSNNAIILMRDNLYYLGIFNAKNKPDKKIIEGNTSENKGDYKKMIYNLLPGPNKMIPKVFLSSKTGVETYKPSAYILEGYKQNKHIKSSKDFDITFCHDLIDYFKNCIAIHPEWKNFGFDFSDTSTYEDISGFYREVELQGYKIDWTYISEKDIDLLQEKGQLYLFQIYNKDFSKKSTGNDNLHTMYLKNLFSEENLKDIVLKLNGEAEIFFRKSSIKNPIIHKKGSILVNRTYEAEEKDQFGNIQIVRKNIPENIYQELYKYFNDKSDKELSDEAAKLKNVVGHHEAATNIVKDYRYTYDKYFLHMPITINFKANKTGFINDRILQYIAKEKDLHVIGIDRGERNLIYVSVIDTCGNIVEQKSFNIVNGYDYQIKLKQQEGARQIARKEWKEIGKIKEIKEGYLSLVIHEISKMVIKYNAIIAMEDLSYGFKKGRFKVERQVYQKFETMLINKLNYLVFKDISITENGGLLKGYQLTYIPDKLKNVGHQCGCIFYVPAAYTSKIDPTTGFVNIFKFKDLTVDAKREFIKKFDSIRYDSEKNLFCFTFDYNNFITQNTVMSKSSWSVYTYGVRIKRRFVNGRFSNESDTIDITKDMEKTLEMTDINWRDGHDLRQDIIDYEIVQHIFEIFRLTVQMRNSLSELEDRDYDRLISPVLNENNIFYDSAKAGDALPKDADANGAYCIALKGLYEIKQITENWKEDGKFSRDKLKISNKDWFDFIQNKRYL

SEQ ID NO: 91 - DNA, 3789 bp, synthetic construct
  source 1..3789: mol_type = other DNA
atgaataacggtaccaataactttcaaaattttatcgggatctcctcgttgcaaaaaactcttcgtaatgctttaatcccgactgagacaacacagcagttcatcgttaaaaacggcatcattaaagaagatgagctgcgcggcgagaaccgtcagattttaaaggacatcatggacgactattaccgtgggttcatctcagaaacattaagcagcatcgatgatatcgactggacctcactgtttgagaagatggagattcaacttaagaatggagacaacaaagacactttaattaaggagcagacggaatatcgtaaagctatccataaaaaatttgcaaacgatgaccgtttcaaaaatatgttttccgcaaaattgattagcgacattttacctgaattcgtaatccataacaacaactattccgcatctgaaaaagaggagaagacccaagttatcaaacttttttcacgtttcgcgacatcttttaaagactactttaagaatcgtgcgaattgtttcagtgcagatgatatttcgtctagttcatgtcaccgtatcgtgaatgacaacgctgagattttcttttctaatgcgttggtgtatcgccgcatcgtaaagtccttgtcgaatgatgatatcaacaaaattagtggtgacatgaaagactccctgaaagaaatgtcattagaggagatttacagctacgaaaaatacggagagttcatcactcaggaaggtatctccttttacaacgatatttgcggcaaagttaatagtttcatgaatctgtattgtcagaagaataaggaaaacaagaatctgtacaagttacaaaagcttcataaacagatcttgtgcatcgccgacacgtcttatgaagtcccgtataaatttgaaagcgacgaagaagtatatcagagtgtgaatggattcttggacaatatctcatcaaaacacattgttgaacgtttgcgcaaaatcggcgacaactataacggatacaacttggataaaatttatatcgtatcaaaattttatgaatcagtatcccaaaagacttaccgtgattgggagactattaatacggcgttagaaatccattacaacaacattctgccgggtaacggtaaatcgaaagcggacaaagtgaagaaggcggttaagaacgatcttcagaagtctatcacggagattaatgagctggtttccaattacaagttgtgctcggatgataacatcaaagctgaaacctatatccatgaaatttctcatattcttaataacttcgaggcacaagaattaaaatataacccagaaattcatctggttgagagcgaacttaaagcttcagaattaaaaaatgttttggacgtaattatgaacgccttccattggtgcagcgtgtttatgacagaggagttagtagataaggataacaacttttatgcagaattggaagagatctatgatgagatctatccagtgatttcactgtataacttagtccgtaattacgtcactcagaagccgtactcaactccgaagatcaagttaaattttggaattccgacattggcggatggttggagtaagtctaaggaatactcaaataacgctattatcttaatgcgtgacaacctgtattacttgggtattttcaatgccaaaaataagcccgataaaaaaatcattgaagggaatacttcagaaaataagggagattacaaaaaaatgatttataaccttttgccaggcccaaacaaaatgatccccaaggtgtttttgagtagtaagacgggagtagaaacatataagccatcagcgtacattcttgaagggtacaaacaaaataaacacatcaagagcagcaaggactttgacattacattttgtcatgacttaatcgactactttaaaaattgcattgccattcaccctgagtggaaaaattttggtttcgacttcagtgatacctctacctatgaagatatctctggtttttatcgtgaggtagaacttcagggttacaagatcgattggacgtacatttccgagaaagacattgatcttttacaagagaagggtcagctttacttatttcagatctacaataaagacttttcgaaaaaatccacgggcaacgacaaccttcatacaatgtacttaaagaacctgttctctgaagaaaacttgaaagatatcgtgcttaaattgaatggcgaggccgagatttttttccgtaaaagctcgattaagaatcccatcatccacaagaaaggcagcattctggtaaatcgtacctatgaagcggaggaaaaggaccaatttggtaatattcagattgtccgtaagaacatccctgaaaatatctatcaagaattatataaatatttcaacgataagtcggacaaggaacttagcgatgaagccgcgaagttgaaaaatgttgttggtcaccacgaagcagcaacaaacattgtgaaagactatcgctacacttacgataagtactttttacatatgcctattacgattaactttaaggcaaataagacaggttttatcaacgaccgtatcctgcaatatattgcaaaagagaaggacctgcatgtcattgggattgatcgcggtgaacgcaatctgatttacgtgagtgttattgatacctgcggtaatattgttgagcaaaagtcttttaatatcgttaatggttacgactaccaaattaagcttaaacaacaggaaggtgcccgccagatcgcccgtaaggagtggaaggaaatcggaaaaattaaggaaatcaaagagggatatctgagcttggttattcatgaaatctcaaagatggttattaagtacaacgccatcatcgctatggaagacttatcgtatgggtttaaaaagggtcgtttcaaagttgagcgccaggtctaccaaaagtttgaaacgatgcttattaataaattaaactacttggttttcaaagatatctctattaccgagaatggaggtttactgaaaggataccagttaacgtatatccccgataagcttaaaaacgtgggccatcagtgtggctgtattttctatgtgcccgcggcatatacatcaaaaattgacccgacgacgggtttcgttaatatcttcaagttcaaagatctgacagttgatgcaaaacgcgaattcattaagaagttcgatagtattcgctatgactccgagaaaaatttgttttgcttcacttttgactacaataactttattactcagaatacagtcatgagtaaaagctcctggtcggtttacacgtacggggtacgcatcaaacgtcgttttgtgaatggtcgttttagtaatgagtcggatacaattgatattaccaaggatatggagaagactctggaaatgacagacatcaattggcgtgatggacatgatttgcgtcaggacattatcgactatgagattgtgcagcatattttcgaaatttttcgcctgacggtgcaaatgcgtaattccttaagcgaactggaagatcgcgactatgaccgcttaatttctcctgtgctgaatgagaacaacatcttctatgactcagcgaaagccggggacgctttgccaaaggatgcagatgctaacggtgcatattgtattgctctgaaaggcctttacgagatcaaacaaattactgaaaactggaaggaagatggaaagttttcccgtgataaattgaagatctctaataaggactggtttgactttatccaaaataaacgttattta

SEQ ID NO: 92 - protein, 1263 aa, synthetic construct
MNNGTNNFQNFIGISSLQKTLRNALIPTETTQQFIVKNGIIKEDELRGENRQILKDIMDDYYRGFISETLSSIDDIDWTSLFEKMEIQLKNGDNKDTLIKEQTEYRKAIHKKFANDDRFKNMFSAKLISDILPEFVIHNNNYSASEKEEKTQVIKLFSRFATSFKDYFKNRANCFSADDISSSSCHRIVNDNAEIFFSNALVYRRIVKSLSNDDINKISGDMKDSLKEMSLEEIYSYEKYGEFITQEGISFYNDICGKVNSFMNLYCQKNKENKNLYKLQKLHKQILCIADTSYEVPYKFESDEEVYQSVNGFLDNISSKHIVERLRKIGDNYNGYNLDKIYIVSKFYESVSQKTYRDWETINTALEIHYNNILPGNGKSKADKVKKAVKNDLQKSITEINELVSNYKLCSDDNIKAETYIHEISHILNNFEAQELKYNPEIHLVESELKASELKNVLDVIMNAFHWCSVFMTEELVDKDNNFYAELEEIYDEIYPVISLYNLVRNYVTQKPYSTPKIKLNFGIPTLADGWSKSKEYSNNAIILMRDNLYYLGIFNAKNKPDKKIIEGNTSENKGDYKKMIYNLLPGPNKMIPKVFLSSKTGVETYKPSAYILEGYKQNKHIKSSKDFDITFCHDLIDYFKNCIAIHPEWKNFGFDFSDTSTYEDISGFYREVELQGYKIDWTYISEKDIDLLQEKGQLYLFQIYNKDFSKKSTGNDNLHTMYLKNLFSEENLKDIVLKLNGEAEIFFRKSSIKNPIIHKKGSILVNRTYEAEEKDQFGNIQIVRKNIPENIYQELYKYFNDKSDKELSDEAAKLKNVVGHHEAATNIVKDYRYTYDKYFLHMPITINFKANKTGFINDRILQYIAKEKDLHVIGIDRGERNLIYVSVIDTCGNIVEQKSFNIVNGYDYQIKLKQQEGARQIARKEWKEIGKIKEIKEGYLSLVIHEISKMVIKYNAIIAMEDLSYGFKKGRFKVERQVYQKFETMLINKLNYLVFKDISITENGGLLKGYQLTYIPDKLKNVGHQCGCIFYVPAAYTSKIDPTTGFVNIFKFKDLTVDAKREFIKKFDSIRYDSEKNLFCFTFDYNNFITQNTVMSKSSWSVYTYGVRIKRRFVNGRFSNESDTIDITKDMEKTLEMTDINWRDGHDLRQDIIDYEIVQHIFEIFRLTVQMRNSLSELEDRDYDRLISPVLNENNIFYDSAKAGDALPKDADANGAYCIALKGLYEIKQITENWKEDGKFSRDKLKISNKDWFDFIQNKRYL

SEQ ID NO: 93 - DNA, 3789 bp, synthetic construct
  source 1..3789: mol_type = other DNA
atgaataacggtaccaataactttcaaaattttatcgggatctcctcgttgcaaaaaactcttcgtaatgctttaatcccgactgagacaacacagcagttcatcgttaaaaacggcatcattaaagaagatgagctgcgcggcgagaaccgtcagattttaaaggacatcatggacgactattaccgtgggttcatctcagaaacattaagcagcatcgatgatatcgactggacctcactgtttgagaagatggagattcaacttaagaatggagacaacaaagacactttaattaaggagcagacggaatatcgtaaagctatccataaaaaatttgcaaacgatgaccgtttcaaaaatatgttttccgcaaaattgattagcgacattttacctgaattcgtaatccataacaacaactattccgcatctgaaaaagaggagaagacccaagttatcaaacttttttcacgtttcgcgacatcttttaaagactactttaagaatcgtgcgaattgtttcagtgcagatgatatttcgtctagttcatgtcaccgtatcgtgaatgacaacgctgagattttcttttctaatgcgttggtgtatcgccgcatcgtaaagtccttgtcgaatgatgatatcaacaaaattagtggtgacatgaaagactccctgaaagaaatgtcattagaggagatttacagctacgaaaaatacggagagttcatcactcaggaaggtatctccttttacaacgatatttgcggcaaagttaatagtttcatgaatctgtattgtcagaagaataaggaaaacaagaatctgtacaagttacaaaagcttcataaacagatcttgtgcatcgccgacacgtcttatgaagtcccgtataaatttgaaagcgacgaagaagtatatcagagtgtgaatggattcttggacaatatctcatcaaaacacattgttgaacgtttgcgcaaaatcggcgacaactataacggatacaacttggataaaatttatatcgtatcaaaattttatgaatcagtatcccaaaagacttaccgtgattgggagactattaatacggcgttagaaatccattacaacaacattctgccgggtaacggtaaatcgaaagcggacaaagtgaagaaggcggttaagaacgatcttcagaagtctatcacggagattaatgagctggtttccaattacaagttgtgctcggatgataacatcaaagctgaaacctatatccatgaaatttctcatattcttaataacttcgaggcacaagaattaaaatataacccagaaattcatctggttgagagcgaacttaaagcttcagaattaaaaaatgttttggacgtaattatgaacgccttccattggtgcagcgtgtttatgacagaggagttagtagataaggataacaacttttatgcagaattggaagagatctatgatgagatctatccagtgatttcactgtataacttagtccgtaattacgtcactcagaagccgtactcaactaaaccgatcaagttaaattttggaattccgacattggcggatggttggagtaagtctaaggaatactcaaataacgctattatcttaatgcgtgacaacctgtattacttgggtattttcaatgccaaaaataagcccgataaaaaaatcattgaagggaatacttcagaaaataagggagattacaaaaaaatgatttataaccttttgccaggcccaaacaaaatgatccccaaggtgtttttgagtagtaagacgggagtagaaacatataagccatcagcgtacattcttgaagggtacaaacaaaataaacacatcaagagcagcaaggactttgacattacattttgtcatgacttaatcgactactttaaaaattgcattgccattcaccctgagtggaaaaattttggtttcgacttcagtgatacctctacctatgaagatatctctggtttttatcgtgaggtagaacttcagggttacaagatcgattggacgtacatttccgagaaagacattgatcttttacaagagaagggtcagctttacttatttcagatctacaataaagacttttcgaaaaaatccacgggcaacgacaaccttcatacaatgtacttaaagaacctgttctctgaagaaaacttgaaagatatcgtgcttaaattgaatggcgaggccgagatttttttccgtaaaagctcgattaagaatcccatcatccacaagaaaggcagcattctggtaaatcgtacctatgaagcggaggaaaaggaccaatttggtaatattcagattgtccgtaagaacatccctgaaaatatctatcaagaattatataaatatttcaacgataagtcggacaaggaacttagcgatgaagccgcgaagttgaaaaatgttgttggtcaccacgaagcagcaacaaacattgtgaaagactatcgctacacttacgataagtactttttacatatgcctattacgattaactttaaggcaaataagacaggttttatcaacgaccgtatcctgcaatatattgcaaaagagaaggacctgcatgtcattgggattgatcgcggtgaacgcaatctgatttacgtgagtgttattgatacctgcggtaatattgttgagcaaaagtcttttaatatcgttaatggttacgactaccaaattaagcttaaacaacaggaaggtgcccgccagatcgcccgtaaggagtggaaggaaatcggaaaaattaaggaaatcaaagagggatatctgagcttggttattcatgaaatctcaaagatggttattaagtacaacgccatcatcgctatggaagacttatcgtatgggtttaaaaagggtcgtttcaaagttgagcgccaggtctaccaaaagtttgaaacgatgcttattaataaattaaactacttggttttcaaagatatctctattaccgagaatggaggtttactgaaaggataccagttaacgtatatccccgataagcttaaaaacgtgggccatcagtgtggctgtattttctatgtgcccgcggcatatacatcaaaaattgacccgacgacgggtttcgttaatatcttcaagttcaaagatctgacagttgatgcaaaacgcgaattcattaagaagttcgatagtattcgctatgactccgagaaaaatttgttttgcttcacttttgactacaataactttattactcagaatacagtcatgagtaaaagctcctggtcggtttacacgtacggggtacgcatcaaacgtcgttttgtgaatggtcgttttagtaatgagtcggatacaattgatattaccaaggatatggagaagactctggaaatgacagacatcaattggcgtgatggacatgatttgcgtcaggacattatcgactatgagattgtgcagcatattttcgaaatttttcgcctgacggtgcaaatgcgtaattccttaagcgaactggaagatcgcgactatgaccgcttaatttctcctgtgctgaatgagaacaacatcttctatgactcagcgaaagccggggacgctttgccaaaggatgcagatgctaacggtgcatattgtattgctctgaaaggcctttacgagatcaaacaaattactgaaaactggaaggaagatggaaagttttcccgtgataaattgaagatctctaataaggactggtttgactttatccaaaataaacgttattta

SEQ ID NO: 94 - protein, 1263 aa, synthetic construct
MNNGTNNFQNFIGISSLQKTLRNALIPTETTQQFIVKNGIIKEDELRGENRQILKDIMDDYYRGFISETLSSIDDIDWTSLFEKMEIQLKNGDNKDTLIKEQTEYRKAIHKKFANDDRFKNMFSAKLISDILPEFVIHNNNYSASEKEEKTQVIKLFSRFATSFKDYFKNRANCFSADDISSSSCHRIVNDNAEIFFSNALVYRRIVKSLSNDDINKISGDMKDSLKEMSLEEIYSYEKYGEFITQEGISFYNDICGKVNSFMNLYCQKNKENKNLYKLQKLHKQILCIADTSYEVPYKFESDEEVYQSVNGFLDNISSKHIVERLRKIGDNYNGYNLDKIYIVSKFYESVSQKTYRDWETINTALEIHYNNILPGNGKSKADKVKKAVKNDLQKSITEINELVSNYKLCSDDNIKAETYIHEISHILNNFEAQELKYNPEIHLVESELKASELKNVLDVIMNAFHWCSVFMTEELVDKDNNFYAELEEIYDEIYPVISLYNLVRNYVTQKPYSTKPIKLNFGIPTLADGWSKSKEYSNNAIILMRDNLYYLGIFNAKNKPDKKIIEGNTSENKGDYKKMIYNLLPGPNKMIPKVFLSSKTGVETYKPSAYILEGYKQNKHIKSSKDFDITFCHDLIDYFKNCIAIHPEWKNFGFDFSDTSTYEDISGFYREVELQGYKIDWTYISEKDIDLLQEKGQLYLFQIYNKDFSKKSTGNDNLHTMYLKNLFSEENLKDIVLKLNGEAEIFFRKSSIKNPIIHKKGSILVNRTYEAEEKDQFGNIQIVRKNIPENIYQELYKYFNDKSDKELSDEAAKLKNVVGHHEAATNIVKDYRYTYDKYFLHMPITINFKANKTGFINDRILQYIAKEKDLHVIGIDRGERNLIYVSVIDTCGNIVEQKSFNIVNGYDYQIKLKQQEGARQIARKEWKEIGKIKEIKEGYLSLVIHEISKMVIKYNAIIAMEDLSYGFKKGRFKVERQVYQKFETMLINKLNYLVFKDISITENGGLLKGYQLTYIPDKLKNVGHQCGCIFYVPAAYTSKIDPTTGFVNIFKFKDLTVDAKREFIKKFDSIRYDSEKNLFCFTFDYNNFITQNTVMSKSSWSVYTYGVRIKRRFVNGRFSNESDTIDITKDMEKTLEMTDINWRDGHDLRQDIIDYEIVQHIFEIFRLTVQMRNSLSELEDRDYDRLISPVLNENNIFYDSAKAGDALPKDADANGAYCIALKGLYEIKQITENWKEDGKFSRDKLKISNKDWFDFIQNKRYL

SEQ ID NO: 95 - DNA, 3789 bp, synthetic construct
  source 1..3789: mol_type = other DNA
atgaataacggtaccaataactttcaaaattttatcgggatctcctcgttgcaaaaaactcttcgtaatgctttaatcccgactgagacaacacagcagttcatcgttaaaaacggcatcattaaagaagatgagctgcgcggcgagaaccgtcagattttaaaggacatcatggacgactattaccgtgggttcatctcagaaacattaagcagcatcgatgatatcgactggacctcactgtttgagaagatggagattcaacttaagaatggagacaacaaagacactttaattaaggagcagacggaatatcgtaaagctatccataaaaaatttgcaaacgatgaccgtttcaaaaatatgttttccgcaaaattgattagcgacattttacctgaattcgtaatccataacaacaactattccgcatctgaaaaagaggagaagacccaagttatcaaacttttttcacgtttcgcgacatcttttaaagactactttaagaatcgtgcgaattgtttcagtgcagatgatatttcgtctagttcatgtcaccgtatcgtgaatgacaacgctgagattttcttttctaatgcgttggtgtatcgccgcatcgtaaagtccttgtcgaatgatgatatcaacaaaattagtggtgacatgaaagactccctgaaagaaatgtcattagaggagatttacagctacgaaaaatacggagagttcatcactcaggaaggtatctccttttacaacgatatttgcggcaaagttaatagtttcatgaatctgtattgtcagaagaataaggaaaacaagaatctgtacaagttacaaaagcttcataaacagatcttgtgcatcgccgacacgtcttatgaagtcccgtataaatttgaaagcgacgaagaagtatatcagagtgtgaatggattcttggacaatatctcatcaaaacacattgttgaacgtttgcgcaaaatcggcgacaactataacggatacaacttggataaaatttatatcgtatcaaaattttatgaatcagtatcccaaaagacttaccgtgattgggagactattaatacggcgttagaaatccattacaacaacattctgccgggtaacggtaaatcgaaagcggacaaagtgaagaaggcggttaagaacgatcttcagaagtctatcacggagattaatgagctggtttccaattacaagttgtgctcggatgataacatcaaagctgaaacctatatccatgaaatttctcatattcttaataacttcgaggcacaagaattaaaatataacccagaaattcatctggttgagagcgaacttaaagcttcagaattaaaaaatgttttggacgtaattatgaacgccttccattggtgcagcgtgtttatgacagaggagttagtagataaggataacaacttttatgcagaattggaagagatctatgatgagatctatccagtgatttcactgtataacttagtccgtaattacgtcactcagaagccgtactcaactaaaaagccgaagttaaattttggaattccgacattggcggatggttggagtaagtctaaggaatactcaaataacgctattatcttaatgcgtgacaacctgtattacttgggtattttcaatgccaaaaataagcccgataaaaaaatcattgaagggaatacttcagaaaataagggagattacaaaaaaatgatttataaccttttgccaggcccaaacaaaatgatccccaaggtgtttttgagtagtaagacgggagtagaaacatataagccatcagcgtacattcttgaagggtacaaacaaaataaacacatcaagagcagcaaggactttgacattacattttgtcatgacttaatcgactactttaaaaattgcattgccattcaccctgagtggaaaaattttggtttcgacttcagtgatacctctacctatgaagatatctctggtttttatcgtgaggtagaacttcagggttacaagatcgattggacgtacatttccgagaaagacattgatcttttacaagagaagggtcagctttacttatttcagatctacaataaagacttttcgaaaaaatccacgggcaacgacaaccttcatacaatgtacttaaagaacctgttctctgaagaaaacttgaaagatatcgtgcttaaattgaatggcgaggccgagatttttttccgtaaaagctcgattaagaatcccatcatccacaagaaaggcagcattctggtaaatcgtacctatgaagcggaggaaaaggaccaatttggtaatattcagattgtccgtaagaacatccctgaaaatatctatcaagaattatataaatatttcaacgataagtcggacaaggaacttagcgatgaagccgcgaagttgaaaaatgttgttggtcaccacgaagcagcaacaaacattgtgaaagactatcgctacacttacgataagtactttttacatatgcctattacgattaactttaaggcaaataagacaggttttatcaacgaccgtatcctgcaatatattgcaaaagagaaggacctgcatgtcattgggattgatcgcggtgaacgcaatctgatttacgtgagtgttattgatacctgcggtaatattgttgagcaaaagtcttttaatatcgttaatggttacgactaccaaattaagcttaaacaacaggaaggtgcccgccagatcgcccgtaaggagtggaaggaaatcggaaaaattaaggaaatcaaagagggatatctgagcttggttattcatgaaatctcaaagatggttattaagtacaacgccatcatcgctatggaagacttatcgtatgggtttaaaaagggtcgtttcaaagttgagcgccaggtctaccaaaagtttgaaacgatgcttattaataaattaaactacttggttttcaaagatatctctattaccgagaatggaggtttactgaaaggataccagttaacgtatatccccgataagcttaaaaacgtgggccatcagtgtggctgtattttctatgtgcccgcggcatatacatcaaaaattgacccgacgacgggtttcgttaatatcttcaagttcaaagatctgacagttgatgcaaaacgcgaattcattaagaagttcgatagtattcgctatgactccgagaaaaatttgttttgcttcacttttgactacaataactttattactcagaatacagtcatgagtaaaagctcctggtcggtttacacgtacggggtacgcatcaaacgtcgttttgtgaatggtcgttttagtaatgagtcggatacaattgatattaccaaggatatggagaagactctggaaatgacagacatcaattggcgtgatggacatgatttgcgtcaggacattatcgactatgagattgtgcagcatattttcgaaatttttcgcctgacggtgcaaatgcgtaattccttaagcgaactggaagatcgcgactatgaccgcttaatttctcctgtgctgaatgagaacaacatcttctatgactcagcgaaagccggggacgctttgccaaaggatgcagatgctaacggtgcatattgtattgctctgaaaggcctttacgagatcaaacaaattactgaaaactggaaggaagatggaaagttttcccgtgataaattgaagatctctaataaggactggtttgactttatccaaaataaacgttattta

SEQ ID NO: 96 - protein, 1263 aa, synthetic construct
MNNGTNNFQNFIGISSLQKTLRNALIPTETTQQFIVKNGIIKEDELRGENRQILKDIMDDYYRGFISETLSSIDDIDWTSLFEKMEIQLKNGDNKDTLIKEQTEYRKAIHKKFANDDRFKNMFSAKLISDILPEFVIHNNNYSASEKEEKTQVIKLFSRFATSFKDYFKNRANCFSADDISSSSCHRIVNDNAEIFFSNALVYRRIVKSLSNDDINKISGDMKDSLKEMSLEEIYSYEKYGEFITQEGISFYNDICGKVNSFMNLYCQKNKENKNLYKLQKLHKQILCIADTSYEVPYKFESDEEVYQSVNGFLDNISSKHIVERLRKIGDNYNGYNLDKIYIVSKFYESVSQKTYRDWETINTALEIHYNNILPGNGKSKADKVKKAVKNDLQKSITEINELVSNYKLCSDDNIKAETYIHEISHILNNFEAQELKYNPEIHLVESELKASELKNVLDVIMNAFHWCSVFMTEELVDKDNNFYAELEEIYDEIYPVISLYNLVRNYVTQKPYSTKKPKLNFGIPTLADGWSKSKEYSNNAIILMRDNLYYLGIFNAKNKPDKKIIEGNTSENKGDYKKMIYNLLPGPNKMIPKVFLSSKTGVETYKPSAYILEGYKQNKHIKSSKDFDITFCHDLIDYFKNCIAIHPEWKNFGFDFSDTSTYEDISGFYREVELQGYKIDWTYISEKDIDLLQEKGQLYLFQIYNKDFSKKSTGNDNLHTMYLKNLFSEENLKDIVLKLNGEAEIFFRKSSIKNPIIHKKGSILVNRTYEAEEKDQFGNIQIVRKNIPENIYQELYKYFNDKSDKELSDEAAKLKNVVGHHEAATNIVKDYRYTYDKYFLHMPITINFKANKTGFINDRILQYIAKEKDLHVIGIDRGERNLIYVSVIDTCGNIVEQKSFNIVNGYDYQIKLKQQEGARQIARKEWKEIGKIKEIKEGYLSLVIHEISKMVIKYNAIIAMEDLSYGFKKGRFKVERQVYQKFETMLINKLNYLVFKDISITENGGLLKGYQLTYIPDKLKNVGHQCGCIFYVPAAYTSKIDPTTGFVNIFKFKDLTVDAKREFIKKFDSIRYDSEKNLFCFTFDYNNFITQNTVMSKSSWSVYTYGVRIKRRFVNGRFSNESDTIDITKDMEKTLEMTDINWRDGHDLRQDIIDYEIVQHIFEIFRLTVQMRNSLSELEDRDYDRLISPVLNENNIFYDSAKAGDALPKDADANGAYCIALKGLYEIKQITENWKEDGKFSRDKLKISNKDWFDFIQNKRYL

SEQ ID NO: 97 - DNA, 3789 bp, synthetic construct
  source 1..3789: mol_type = other DNA
atgaataacggtaccaataactttcaaaattttatcgggatctcctcgttgcaaaaaactcttcgtaatgctttaatcccgactgagacaacacagcagttcatcgttaaaaacggcatcattaaagaagatgagctgcgcggcgagaaccgtcagattttaaaggacatcatggacgactattaccgtgggttcatctcagaaacattaagcagcatcgatgatatcgactggacctcactgtttgagaagatggagattcaacttaagaatggagacaacaaagacactttaattaaggagcagacggaatatcgtaaagctatccataaaaaatttgcaaacgatgaccgtttcaaaaatatgttttccgcaaaattgattagcgacattttacctgaattcgtaatccataacaacaactattccgcatctgaaaaagaggagaagacccaagttatcaaacttttttcacgtttcgcgacatcttttaaagactactttaagaatcgtgcgaattgtttcagtgcagatgatatttcgtctagttcatgtcaccgtatcgtgaatgacaacgctgagattttcttttctaatgcgttggtgtatcgccgcatcgtaaagtccttgtcgaatgatgatatcaacaaaattagtggtgacatgaaagactccctgaaagaaatgtcattagaggagatttacagctacgaaaaatacggagagttcatcactcaggaaggtatctccttttacaacgatatttgcggcaaagttaatagtttcatgaatctgtattgtcagaagaataaggaaaacaagaatctgtacaagttacaaaagcttcataaacagatcttgtgcatcgccgacacgtcttatgaagtcccgtataaatttgaaagcgacgaagaagtatatcagagtgtgaatggattcttggacaatatctcatcaaaacacattgttgaacgtttgcgcaaaatcggcgacaactataacggatacaacttggataaaatttatatcgtatcaaaattttatgaatcagtatcccaaaagacttaccgtgattgggagactattaatacggcgttagaaatccattacaacaacattctgccgggtaacggtaaatcgaaagcggacaaagtgaagaaggcggttaagaacgatcttcagaagtctatcacggagattaatgagctggtttccaattacaagttgtgctcggatgataacatcaaagctgaaacctatatccatgaaatttctcatattcttaataacttcgaggcacaagaattaaaatataacccagaaattcatctggttgagagcgaacttaaagcttcagaattaaaaaatgttttggacgtaattatgaacgccttccattggtgcagcgtgtttatgacagaggagttagtagataaggataacaacttttatgcagaattggaagagatctatgatgagatctatccagtgatttcactgtataacttagtccgtaattacgtcactcagaagccgtactcaactaaaaagatcaagatgaattttggaattccgacattggcggatggttggagtaagtctaaggaatactcaaataacgctattatcttaatgcgtgacaacctgtattacttgggtattttcaatgccaaaaataagcccgataaaaaaatcattgaagggaatacttcagaaaataagggagattacaaaaaaatgatttataaccttttgccaggcccaaacaaaatgatccccaaggtgtttttgagtagtaagacgggagtagaaacatataagccatcagcgtacattcttgaagggtacaaacaaaataaacacatcaagagcagcaaggactttgacattacattttgtcatgacttaatcgactactttaaaaattgcattgccattcaccctgagtggaaaaattttggtttcgacttcagtgatacctctacctatgaagatatctctggtttttatcgtgaggtagaacttcagggttacaagatcgattggacgtacatttccgagaaagacattgatcttttacaagagaagggtcagctttacttatttcagatctacaataaagacttttcgaaaaaatccacgggcaacgacaaccttcatacaatgtacttaaagaacctgttctctgaagaaaacttgaaagatatcgtgcttaaattgaatggcgaggccgagatttttttccgtaaaagctcgattaagaatcccatcatccacaagaaaggcagcattctggtaaatcgtacctatgaagcggaggaaaaggaccaatttggtaatattcagattgtccgtaagaacatccctgaaaatatctatcaagaattatataaatatttcaacgataagtcggacaaggaacttagcgatgaagccgcgaagttgaaaaatgttgttggtcaccacgaagcagcaacaaacattgtgaaagactatcgctacacttacgataagtactttttacatatgcctattacgattaactttaaggcaaataagacaggttttatcaacgaccgtatcctgcaatatattgcaaaagagaaggacctgcatgtcattgggattgatcgcggtgaacgcaatctgatttacgtgagtgttattgatacctgcggtaatattgttgagcaaaagtcttttaatatcgttaatggttacgactaccaaattaagcttaaacaacaggaaggtgcccgccagatcgcccgtaaggagtggaaggaaatcggaaaaattaaggaaatcaaagagggatatctgagcttggttattcatgaaatctcaaagatggttattaagtacaacgccatcatcgctatggaagacttatcgtatgggtttaaaaagggtcgtttcaaagttgagcgccaggtctaccaaaagtttgaaacgatgcttattaataaattaaactacttggttttcaaagatatctctattaccgagaatggaggtttactgaaaggataccagttaacgtatatccccgataagcttaaaaacgtgggccatcagtgtggctgtattttctatgtgcccgcggcatatacatcaaaaattgacccgacgacgggtttcgttaatatcttcaagttcaaagatctgacagttgatgcaaaacgcgaattcattaagaagttcgatagtattcgctatgactccgagaaaaatttgttttgcttcacttttgactacaataactttattactcagaatacagtcatgagtaaaagctcctggtcggtttacacgtacggggtacgcatcaaacgtcgttttgtgaatggtcgttttagtaatgagtcggatacaattgatattaccaaggatatggagaagactctggaaatgacagacatcaattggcgtgatggacatgatttgcgtcaggacattatcgactatgagattgtgcagcatattttcgaaatttttcgcctgacggtgcaaatgcgtaattccttaagcgaactggaagatcgcgactatgaccgcttaatttctcctgtgctgaatgagaacaacatcttctatgactcagcgaaagccggggacgctttgccaaaggatgcagatgctaacggtgcatattgtattgctctgaaaggcctttacgagatcaaacaaattactgaaaactggaaggaagatggaaagttttcccgtgataaattgaagatctctaataaggactggtttgactttatccaaaataaacgttattta

SEQ ID NO: 98 - protein, 1263 aa, synthetic construct
MNNGTNNFQNFIGISSLQKTLRNALIPTETTQQFIVKNGIIKEDELRGENRQILKDIMDDYYRGFISETLSSIDDIDWTSLFEKMEIQLKNGDNKDTLIKEQTEYRKAIHKKFANDDRFKNMFSAKLISDILPEFVIHNNNYSASEKEEKTQVIKLFSRFATSFKDYFKNRANCFSADDISSSSCHRIVNDNAEIFFSNALVYRRIVKSLSNDDINKISGDMKDSLKEMSLEEIYSYEKYGEFITQEGISFYNDICGKVNSFMNLYCQKNKENKNLYKLQKLHKQILCIADTSYEVPYKFESDEEVYQSVNGFLDNISSKHIVERLRKIGDNYNGYNLDKIYIVSKFYESVSQKTYRDWETINTALEIHYNNILPGNGKSKADKVKKAVKNDLQKSITEINELVSNYKLCSDDNIKAETYIHEISHILNNFEAQELKYNPEIHLVESELKASELKNVLDVIMNAFHWCSVFMTEELVDKDNNFYAELEEIYDEIYPVISLYNLVRNYVTQKPYSTKKIKMNFGIPTLADGWSKSKEYSNNAIILMRDNLYYLGIFNAKNKPDKKIIEGNTSENKGDYKKMIYNLLPGPNKMIPKVFLSSKTGVETYKPSAYILEGYKQNKHIKSSKDFDITFCHDLIDYFKNCIAIHPEWKNFGFDFSDTSTYEDISGFYREVELQGYKIDWTYISEKDIDLLQEKGQLYLFQIYNKDFSKKSTGNDNLHTMYLKNLFSEENLKDIVLKLNGEAEIFFRKSSIKNPIIHKKGSILVNRTYEAEEKDQFGNIQIVRKNIPENIYQELYKYFNDKSDKELSDEAAKLKNVVGHHEAATNIVKDYRYTYDKYFLHMPITINFKANKTGFINDRILQYIAKEKDLHVIGIDRGERNLIYVSVIDTCGNIVEQKSFNIVNGYDYQIKLKQQEGARQIARKEWKEIGKIKEIKEGYLSLVIHEISKMVIKYNAIIAMEDLSYGFKKGRFKVERQVYQKFETMLINKLNYLVFKDISITENGGLLKGYQLTYIPDKLKNVGHQCGCIFYVPAAYTSKIDPTTGFVNIFKFKDLTVDAKREFIKKFDSIRYDSEKNLFCFTFDYNNFITQNTVMSKSSWSVYTYGVRIKRRFVNGRFSNESDTIDITKDMEKTLEMTDINWRDGHDLRQDIIDYEIVQHIFEIFRLTVQMRNSLSELEDRDYDRLISPVLNENNIFYDSAKAGDALPKDADANGAYCIALKGLYEIKQITENWKEDGKFSRDKLKISNKDWFDFIQNKRYL

SEQ ID NO: 99 - DNA, 3789 bp, synthetic construct
  source 1..3789: mol_type = other DNA
atgaataacggtaccaataactttcaaaattttatcgggatctcctcgttgcaaaaaactcttcgtaatgctttaatcccgactgagacaacacagcagttcatcgttaaaaacggcatcattaaagaagatgagctgcgcggcgagaaccgtcagattttaaaggacatcatggacgactattaccgtgggttcatctcagaaacattaagcagcatcgatgatatcgactggacctcactgtttgagaagatggagattcaacttaagaatggagacaacaaagacactttaattaaggagcagacggaatatcgtaaagctatccataaaaaatttgcaaacgatgaccgtttcaaaaatatgttttccgcaaaattgattagcgacattttacctgaattcgtaatccataacaacaactattccgcatctgaaaaagaggagaagacccaagttatcaaacttttttcacgtttcgcgacatcttttaaagactactttaagaatcgtgcgaattgtttcagtgcagatgatatttcgtctagttcatgtcaccgtatcgtgaatgacaacgctgagattttcttttctaatgcgttggtgtatcgccgcatcgtaaagtccttgtcgaatgatgatatcaacaaaattagtggtgacatgaaagactccctgaaagaaatgtcattagaggagatttacagctacgaaaaatacggagagttcatcactcaggaaggtatctccttttacaacgatatttgcggcaaagttaatagtttcatgaatctgtattgtcagaagaataaggaaaacaagaatctgtacaagttacaaaagcttcataaacagatcttgtgcatcgccgacacgtcttatgaagtcccgtataaatttgaaagcgacgaagaagtatatcagagtgtgaatggattcttggacaatatctcatcaaaacacattgttgaacgtttgcgcaaaatcggcgacaactataacggatacaacttggataaaatttatatcgtatcaaaattttatgaatcagtatcccaaaagacttaccgtgattgggagactattaatacggcgttagaaatccattacaacaacattctgccgggtaacggtaaatcgaaagcggacaaagtgaagaaggcggttaagaacgatcttcagaagtctatcacggagattaatgagctggtttccaattacaagttgtgctcggatgataacatcaaagctgaaacctatatccatgaaatttctcatattcttaataacttcgaggcacaagaattaaaatataacccagaaattcatctggttgagagcgaacttaaagcttcagaattaaaaaatgttttggacgtaattatgaacgccttccattggtgcagcgtgtttatgacagaggagttagtagataaggataacaacttttatgcagaattggaagagatctatgatgagatctatccagtgatttcactgtataacttagtccgtaattacgtcactcagaagccgtactcaactaaaaagatcaagttaaatgcgggaattccgacattggcggatggttggagtaagtctaaggaatactcaaataacgctattatcttaatgcgtgacaacctgtattacttgggtattttcaatgccaaaaataagcccgataaaaaaatcattgaagggaatacttcagaaaataagggagattacaaaaaaatgatttataaccttttgccaggcccaaacaaaatgatccccaaggtgtttttgagtagtaagacgggagtagaaacatataagccatcagcgtacattcttgaagggtacaaacaaaataaacacatcaagagcagcaaggactttgacattacattttgtcatgacttaatcgactactttaaaaattgcattgccattcaccctgagtggaaaaattttggtttcgacttcagtgatacctctacctatgaagatatctctggtttttatcgtgaggtagaacttcagggttacaagatcgattggacgtacatttccgagaaagacattgatcttttacaagagaagggtcagctttacttatttcagatctacaataaagacttttcgaaaaaatccacgggcaacgacaaccttcatacaatgtacttaaagaacctgttctctgaagaaaacttgaaagatatcgtgcttaaattgaatggcgaggccgagatttttttccgtaaaagctcgattaagaatcccatcatccacaagaaaggcagcattctggtaaatcgtacctatgaagcggaggaaaaggaccaatttggtaatattcagattgtccgtaagaacatccctgaaaatatctatcaagaattatataaatatttcaacgataagtcggacaaggaacttagcgatgaagccgcgaagttgaaaaatgttgttggtcaccacgaagcagcaacaaacattgtgaaagactatcgctacacttacgataagtactttttacatatgcctattacgattaactttaaggcaaataagacaggttttatcaacgaccgtatcctgcaatatattgcaaaagagaaggacctgcatgtcattgggattgatcgcggtgaacgcaatctgatttacgtgagtgttattgatacctgcggtaatattgttgagcaaaagtcttttaatatcgttaatggttacgactaccaaattaagcttaaacaacaggaaggtgcccgccagatcgcccgtaaggagtggaaggaaatcggaaaaattaaggaaatcaaagagggatatctgagcttggttattcatgaaatctcaaagatggttattaagtacaacgccatcatcgctatggaagacttatcgtatgggtttaaaaagggtcgtttcaaagttgagcgccaggtctaccaaaagtttgaaacgatgcttattaataaattaaactacttggttttcaaagatatctctattaccgagaatggaggtttactgaaaggataccagttaacgtatatccccgataagcttaaaaacgtgggccatcagtgtggctgtattttctatgtgcccgcggcatatacatcaaaaattgacccgacgacgggtttcgttaatatcttcaagttcaaagatctgacagttgatgcaaaacgcgaattcattaagaagttcgatagtattcgctatgactccgagaaaaatttgttttgcttcacttttgactacaataactttattactcagaatacagtcatgagtaaaagctcctggtcggtttacacgtacggggtacgcatcaaacgtcgttttgtgaatggtcgttttagtaatgagtcggatacaattgatattaccaaggatatggagaagactctggaaatgacagacatcaattggcgtgatggacatgatttgcgtcaggacattatcgactatgagattgtgcagcatattttcgaaatttttcgcctgacggtgcaaatgcgtaattccttaagcgaactggaagatcgcgactatgaccgcttaatttctcctgtgctgaatgagaacaacatcttctatgactcagcgaaagccggggacgctttgccaaaggatgcagatgctaacggtgcatattgtattgctctgaaaggcctttacgagatcaaacaaattactgaaaactggaaggaagatggaaagttttcccgtgataaattgaagatctctaataaggactggtttgactttatccaaaataaacgttattta

SEQ ID NO: 100 - protein, 1263 aa, synthetic construct
MNNGTNNFQNFIGISSLQKTLRNALIPTETTQQFIVKNGIIKEDELRGENRQILKDIMDDYYRGFISETLSSIDDIDWTSLFEKMEIQLKNGDNKDTLIKEQTEYRKAIHKKFANDDRFKNMFSAKLISDILPEFVIHNNNYSASEKEEKTQVIKLFSRFATSFKDYFKNRANCFSADDISSSSCHRIVNDNAEIFFSNALVYRRIVKSLSNDDINKISGDMKDSLKEMSLEEIYSYEKYGEFITQEGISFYNDICGKVNSFMNLYCQKNKENKNLYKLQKLHKQILCIADTSYEVPYKFESDEEVYQSVNGFLDNISSKHIVERLRKIGDNYNGYNLDKIYIVSKFYESVSQKTYRDWETINTALEIHYNNILPGNGKSKADKVKKAVKNDLQKSITEINELVSNYKLCSDDNIKAETYIHEISHILNNFEAQELKYNPEIHLVESELKASELKNVLDVIMNAFHWCSVFMTEELVDKDNNFYAELEEIYDEIYPVISLYNLVRNYVTQKPYSTKKIKLNAGIPTLADGWSKSKEYSNNAIILMRDNLYYLGIFNAKNKPDKKIIEGNTSENKGDYKKMIYNLLPGPNKMIPKVFLSSKTGVETYKPSAYILEGYKQNKHIKSSKDFDITFCHDLIDYFKNCIAIHPEWKNFGFDFSDTSTYEDISGFYREVELQGYKIDWTYISEKDIDLLQEKGQLYLFQIYNKDFSKKSTGNDNLHTMYLKNLFSEENLKDIVLKLNGEAEIFFRKSSIKNPIIHKKGSILVNRTYEAEEKDQFGNIQIVRKNIPENIYQELYKYFNDKSDKELSDEAAKLKNVVGHHEAATNIVKDYRYTYDKYFLHMPITINFKANKTGFINDRILQYIAKEKDLHVIGIDRGERNLIYVSVIDTCGNIVEQKSFNIVNGYDYQIKLKQQEGARQIARKEWKEIGKIKEIKEGYLSLVIHEISKMVIKYNAIIAMEDLSYGFKKGRFKVERQVYQKFETMLINKLNYLVFKDISITENGGLLKGYQLTYIPDKLKNVGHQCGCIFYVPAAYTSKIDPTTGFVNIFKFKDLTVDAKREFIKKFDSIRYDSEKNLFCFTFDYNNFITQNTVMSKSSWSVYTYGVRIKRRFVNGRFSNESDTIDITKDMEKTLEMTDINWRDGHDLRQDIIDYEIVQHIFEIFRLTVQMRNSLSELEDRDYDRLISPVLNENNIFYDSAKAGDALPKDADANGAYCIALKGLYEIKQITENWKEDGKFSRDKLKISNKDWFDFIQNKRYL

SEQ ID NO: 101 - DNA, 3789 bp, synthetic construct
  source 1..3789: mol_type = other DNA
atgaataacggtaccaataactttcaaaattttatcgggatctcctcgttgcaaaaaactcttcgtaatgctttaatcccgactgagacaacacagcagttcatcgttaaaaacggcatcattaaagaagatgagctgcgcggcgagaaccgtcagattttaaaggacatcatggacgactattaccgtgggttcatctcagaaacattaagcagcatcgatgatatcgactggacctcactgtttgagaagatggagattcaacttaagaatggagacaacaaagacactttaattaaggagcagacggaatatcgtaaagctatccataaaaaatttgcaaacgatgaccgtttcaaaaatatgttttccgcaaaattgattagcgacattttacctgaattcgtaatccataacaacaactattccgcatctgaaaaagaggagaagacccaagttatcaaacttttttcacgtttcgcgacatcttttaaagactactttaagaatcgtgcgaattgtttcagtgcagatgatatttcgtctagttcatgtcaccgtatcgtgaatgacaacgctgagattttcttttctaatgcgttggtgtatcgccgcatcgtaaagtccttgtcgaatgatgatatcaacaaaattagtggtgacatgaaagactccctgaaagaaatgtcattagaggagatttacagctacgaaaaatacggagagttcatcactcaggaaggtatctccttttacaacgatatttgcggcaaagttaatagtttcatgaatctgtattgtcagaagaataaggaaaacaagaatctgtacaagttacaaaagcttcataaacagatcttgtgcatcgccgacacgtcttatgaagtcccgtataaatttgaaagcgacgaagaagtatatcagagtgtgaatggattcttggacaatatctcatcaaaacacattgttgaacgtttgcgcaaaatcggcgacaactataacggatacaacttggataaaatttatatcgtatcaaaattttatgaatcagtatcccaaaagacttaccgtgattgggagactattaatacggcgttagaaatccattacaacaacattctgccgggtaacggtaaatcgaaagcggacaaagtgaagaaggcggttaagaacgatcttcagaagtctatcacggagattaatgagctggtttccaattacaagttgtgctcggatgataacatcaaagctgaaacctatatccatgaaatttctcatattcttaataacttcgaggcacaagaattaaaatataacccagaaattcatctggttgagagcgaacttaaagcttcagaattaaaaaatgttttggacgtaattatgaacgccttccattggtgcagcgtgtttatgacagaggagttagtagataaggataacaacttttatgcagaattggaagagatctatgatgagatctatccagtgatttcactgtataacttagtccgtaattacgtcactcagaagccgtactcaactaaaaagatcaagttaaattttggaattccgacattggcggatggttggagtaagtctaaggaatactcaaataacgtgattatcttaatgcgtgacaacctgtattacttgggtattttcaatgccaaaaataagcccgataaaaaaatcattgaagggaatacttcagaaaataagggagattacaaaaaaatgatttataaccttttgccaggcccaaacaaaatgatccccaaggtgtttttgagtagtaagacgggagtagaaacatataagccatcagcgtacattcttgaagggtacaaacaaaataaacacatcaagagcagcaaggactttgacattacattttgtcatgacttaatcgactactttaaaaattgcattgccattcaccctgagtggaaaaattttggtttcgacttcagtgatacctctacctatgaagatatctctggtttttatcgtgaggtagaacttcagggttacaagatcgattggacgtacatttccgagaaagacattgatcttttacaagagaagggtcagctttacttatttcagatctacaataaagacttttcgaaaaaatccacgggcaacgacaaccttcatacaatgtacttaaagaacctgttctctgaagaaaacttgaaagatatcgtgcttaaattgaatggcgaggccgagatttttttccgtaaaagctcgattaagaatcccatcatccacaagaaaggcagcattctggtaaatcgtacctatgaagcggaggaaaaggaccaatttggtaatattcagattgtccgtaagaacatccctgaaaatatctatcaagaattatataaatatttcaacgataagtcggacaaggaacttagcgatgaagccgcgaagttgaaaaatgttgttggtcaccacgaagcagcaacaaacattgtgaaagactatcgctacacttacgataagtactttttacatatgcctattacgattaactttaaggcaaataagacaggttttatcaacgaccgtatcctgcaatatattgcaaaagagaaggacctgcatgtcattgggattgatcgcggtgaacgcaatctgatttacgtgagtgttattgatacctgcggtaatattgttgagcaaaagtcttttaatatcgttaatggttacgactaccaaattaagcttaaacaacaggaaggtgcccgccagatcgcccgtaaggagtggaaggaaatcggaaaaattaaggaaatcaaagagggatatctgagcttggttattcatgaaatctcaaagatggttattaagtacaacgccatcatcgctatggaagacttatcgtatgggtttaaaaagggtcgtttcaaagttgagcgccaggtctaccaaaagtttgaaacgatgcttattaataaattaaactacttggttttcaaagatatctctattaccgagaatggaggtttactgaaaggataccagttaacgtatatccccgataagcttaaaaacgtgggccatcagtgtggctgtattttctatgtgcccgcggcatatacatcaaaaattgacccgacgacgggtttcgttaatatcttcaagttcaaagatctgacagttgatgcaaaacgcgaattcattaagaagttcgatagtattcgctatgactccgagaaaaatttgttttgcttcacttttgactacaataactttattactcagaatacagtcatgagtaaaagctcctggtcggtttacacgtacggggtacgcatcaaacgtcgttttgtgaatggtcgttttagtaatgagtcggatacaattgatattaccaaggatatggagaagactctggaaatgacagacatcaattggcgtgatggacatgatttgcgtcaggacattatcgactatgagattgtgcagcatattttcgaaatttttcgcctgacggtgcaaatgcgtaattccttaagcgaactggaagatcgcgactatgaccgcttaatttctcctgtgctgaatgagaacaacatcttctatgactcagcgaaagccggggacgctttgccaaaggatgcagatgctaacggtgcatattgtattgctctgaaaggcctttacgagatcaaacaaattactgaaaactggaaggaagatggaaagttttcccgtgataaattgaagatctctaataaggactggtttgactttatccaaaataaacgttattta

SEQ ID NO: 102 - protein, 1263 aa, synthetic construct
MNNGTNNFQNFIGISSLQKTLRNALIPTETTQQFIVKNGIIKEDELRGENRQILKDIMDDYYRGFISETLSSIDDIDWTSLFEKMEIQLKNGDNKDTLIKEQTEYRKAIHKKFANDDRFKNMFSAKLISDILPEFVIHNNNYSASEKEEKTQVIKLFSRFATSFKDYFKNRANCFSADDISSSSCHRIVNDNAEIFFSNALVYRRIVKSLSNDDINKISGDMKDSLKEMSLEEIYSYEKYGEFITQEGISFYNDICGKVNSFMNLYCQKNKENKNLYKLQKLHKQILCIADTSYEVPYKFESDEEVYQSVNGFLDNISSKHIVERLRKIGDNYNGYNLDKIYIVSKFYESVSQKTYRDWETINTALEIHYNNILPGNGKSKADKVKKAVKNDLQKSITEINELVSNYKLCSDDNIKAETYIHEISHILNNFEAQELKYNPEIHLVESELKASELKNVLDVIMNAFHWCSVFMTEELVDKDNNFYAELEEIYDEIYPVISLYNLVRNYVTQKPYSTKKIKLNFGIPTLADGWSKSKEYSNNVIILMRDNLYYLGIFNAKNKPDKKIIEGNTSENKGDYKKMIYNLLPGPNKMIPKVFLSSKTGVETYKPSAYILEGYKQNKHIKSSKDFDITFCHDLIDYFKNCIAIHPEWKNFGFDFSDTSTYEDISGFYREVELQGYKIDWTYISEKDIDLLQEKGQLYLFQIYNKDFSKKSTGNDNLHTMYLKNLFSEENLKDIVLKLNGEAEIFFRKSSIKNPIIHKKGSILVNRTYEAEEKDQFGNIQIVRKNIPENIYQELYKYFNDKSDKELSDEAAKLKNVVGHHEAATNIVKDYRYTYDKYFLHMPITINFKANKTGFINDRILQYIAKEKDLHVIGIDRGERNLIYVSVIDTCGNIVEQKSFNIVNGYDYQIKLKQQEGARQIARKEWKEIGKIKEIKEGYLSLVIHEISKMVIKYNAIIAMEDLSYGFKKGRFKVERQVYQKFETMLINKLNYLVFKDISITENGGLLKGYQLTYIPDKLKNVGHQCGCIFYVPAAYTSKIDPTTGFVNIFKFKDLTVDAKREFIKKFDSIRYDSEKNLFCFTFDYNNFITQNTVMSKSSWSVYTYGVRIKRRFVNGRFSNESDTIDITKDMEKTLEMTDINWRDGHDLRQDIIDYEIVQHIFEIFRLTVQMRNSLSELEDRDYDRLISPVLNENNIFYDSAKAGDALPKDADANGAYCIALKGLYEIKQITENWKEDGKFSRDKLKISNKDWFDFIQNKRYL

SEQ ID NO: 103 - DNA, 3789 bp, synthetic construct
  source 1..3789: mol_type = other DNA
atgaataacggtaccaataactttcaaaattttatcgggatctcctcgttgcaaaaaactcttcgtaatgctttaatcccgactgagacaacacagcagttcatcgttaaaaacggcatcattaaagaagatgagctgcgcggcgagaaccgtcagattttaaaggacatcatggacgactattaccgtgggttcatctcagaaacattaagcagcatcgatgatatcgactggacctcactgtttgagaagatggagattcaacttaagaatggagacaacaaagacactttaattaaggagcagacggaatatcgtaaagctatccataaaaaatttgcaaacgatgaccgtttcaaaaatatgttttccgcaaaattgattagcgacattttacctgaattcgtaatccataacaacaactattccgcatctgaaaaagaggagaagacccaagttatcaaacttttttcacgtttcgcgacatcttttaaagactactttaagaatcgtgcgaattgtttcagtgcagatgatatttcgtctagttcatgtcaccgtatcgtgaatgacaacgctgagattttcttttctaatgcgttggtgtatcgccgcatcgtaaagtccttgtcgaatgatgatatcaacaaaattagtggtgacatgaaagactccctgaaagaaatgtcattagaggagatttacagctacgaaaaatacggagagttcatcactcaggaaggtatctccttttacaacgatatttgcggcaaagttaatagtttcatgaatctgtattgtcagaagaataaggaaaacaagaatctgtacaagttacaaaagcttcataaacagatcttgtgcatcgccgacacgtcttatgaagtcccgtataaatttgaaagcgacgaagaagtatatcagagtgtgaatggattcttggacaatatctcatcaaaacacattgttgaacgtttgcgcaaaatcggcgacaactataacggatacaacttggataaaatttatatcgtatcaaaattttatgaatcagtatcccaaaagacttaccgtgattgggagactattaatacggcgttagaaatccattacaacaacattctgccgggtaacggtaaatcgaaagcggacaaagtgaagaaggcggttaagaacgatcttcagaagtctatcacggagattaatgagctggtttccaattacaagttgtgctcggatgataacatcaaagctgaaacctatatccatgaaatttctcatattcttaataacttcgaggcacaagaattaaaatataacccagaaattcatctggttgagagcgaacttaaagcttcagaattaaaaaatgttttggacgtaattatgaacgccttccattggtgcagcgtgtttatgacagaggagttagtagataaggataacaacttttatgcagaattggaagagatctatgatgagatctatccagtgatttcactgtataacttagtccgtaattacgtcactcagaagccgtactcaactaaaaagatcaagttaaattttggaattccgacattggcggatggttggagtaagtctaaggaatactcaaataacgctattatcttaatgcgtgacaacctgtattacttgatgattttcaatgccaaaaataagcccgataaaaaaatcattgaagggaatacttcagaaaataagggagattacaaaaaaatgatttataaccttttgccaggcccaaacaaaatgatccccaaggtgtttttgagtagtaagacgggagtagaaacatataagccatcagcgtacattcttgaagggtacaaacaaaataaacacatcaagagcagcaaggactttgacattacattttgtcatgacttaatcgactactttaaaaattgcattgccattcaccctgagtggaaaaattttggtttcgacttcagtgatacctctacctatgaagatatctctggtttttatcgtgaggtagaacttcagggttacaagatcgattggacgtacatttccgagaaagacattgatcttttacaagagaagggtcagctttacttatttcagatctacaataaagacttttcgaaaaaatccacgggcaacgacaaccttcatacaatgtacttaaagaacctgttctctgaagaaaacttgaaagatatcgtgcttaaattgaatggcgaggccgagatttttttccgtaaaagctcgattaagaatcccatcatccacaagaaaggcagcattctggtaaatcgtacctatgaagcggaggaaaaggaccaatttggtaatattcagattgtccgtaagaacatccctgaaaatatctatcaagaattatataaatatttcaacgataagtcggacaaggaacttagcgatgaagccgcgaagttgaaaaatgttgttggtcaccacgaagcagcaacaaacattgtgaaagactatcgctacacttacgataagtactttttacatatgcctattacgattaactttaaggcaaataagacaggttttatcaacgaccgtatcctgcaatatattgcaaaagagaaggacctgcatgtcattgggattgatcgcggtgaacgcaatctgatttacgtgagtgttattgatacctgcggtaatattgttgagcaaaagtcttttaatatcgttaatggttacgactaccaaattaagcttaaacaacaggaaggtgcccgccagatcgcccgtaaggagtggaaggaaatcggaaaaattaaggaaatcaaagagggatatctgagcttggttattcatgaaatctcaaagatggttattaagtacaacgccatcatcgctatggaagacttatcgtatgggtttaaaaagggtcgtttcaaagttgagcgccaggtctaccaaaagtttgaaacgatgcttattaataaattaaactacttggttttcaaagatatctctattaccgagaatggaggtttactgaaaggataccagttaacgtatatccccgataagcttaaaaacgtgggccatcagtgtggctgtattttctatgtgcccgcggcatatacatcaaaaattgacccgacgacgggtttcgttaatatcttcaagttcaaagatctgacagttgatgcaaaacgcgaattcattaagaagttcgatagtattcgctatgactccgagaaaaatttgttttgcttcacttttgactacaataactttattactcagaatacagtcatgagtaaaagctcctggtcggtttacacgtacggggtacgcatcaaacgtcgttttgtgaatggtcgttttagtaatgagtcggatacaattgatattaccaaggatatggagaagactctggaaatgacagacatcaattggcgtgatggacatgatttgcgtcaggacattatcgactatgagattgtgcagcatattttcgaaatttttcgcctgacggtgcaaatgcgtaattccttaagcgaactggaagatcgcgactatgaccgcttaatttctcctgtgctgaatgagaacaacatcttctatgactcagcgaaagccggggacgctttgccaaaggatgcagatgctaacggtgcatattgtattgctctgaaaggcctttacgagatcaaacaaattactgaaaactggaaggaagatggaaagttttcccgtgataaattgaagatctctaataaggactggtttgactttatccaaaataaacgttattta

SEQ ID NO: 104 - protein, 1263 aa, synthetic construct
MNNGTNNFQNFIGISSLQKTLRNALIPTETTQQFIVKNGIIKEDELRGENRQILKDIMDDYYRGFISETLSSIDDIDWTSLFEKMEIQLKNGDNKDTLIKEQTEYRKAIHKKFANDDRFKNMFSAKLISDILPEFVIHNNNYSASEKEEKTQVIKLFSRFATSFKDYFKNRANCFSADDISSSSCHRIVNDNAEIFFSNALVYRRIVKSLSNDDINKISGDMKDSLKEMSLEEIYSYEKYGEFITQEGISFYNDICGKVNSFMNLYCQKNKENKNLYKLQKLHKQILCIADTSYEVPYKFESDEEVYQSVNGFLDNISSKHIVERLRKIGDNYNGYNLDKIYIVSKFYESVSQKTYRDWETINTALEIHYNNILPGNGKSKADKVKKAVKNDLQKSITEINELVSNYKLCSDDNIKAETYIHEISHILNNFEAQELKYNPEIHLVESELKASELKNVLDVIMNAFHWCSVFMTEELVDKDNNFYAELEEIYDEIYPVISLYNLVRNYVTQKPYSTKKIKLNFGIPTLADGWSKSKEYSNNAIILMRDNLYYLMIFNAKNKPDKKIIEGNTSENKGDYKKMIYNLLPGPNKMIPKVFLSSKTGVETYKPSAYILEGYKQNKHIKSSKDFDITFCHDLIDYFKNCIAIHPEWKNFGFDFSDTSTYEDISGFYREVELQGYKIDWTYISEKDIDLLQEKGQLYLFQIYNKDFSKKSTGNDNLHTMYLKNLFSEENLKDIVLKLNGEAEIFFRKSSIKNPIIHKKGSILVNRTYEAEEKDQFGNIQIVRKNIPENIYQELYKYFNDKSDKELSDEAAKLKNVVGHHEAATNIVKDYRYTYDKYFLHMPITINFKANKTGFINDRILQYIAKEKDLHVIGIDRGERNLIYVSVIDTCGNIVEQKSFNIVNGYDYQIKLKQQEGARQIARKEWKEIGKIKEIKEGYLSLVIHEISKMVIKYNAIIAMEDLSYGFKKGRFKVERQVYQKFETMLINKLNYLVFKDISITENGGLLKGYQLTYIPDKLKNVGHQCGCIFYVPAAYTSKIDPTTGFVNIFKFKDLTVDAKREFIKKFDSIRYDSEKNLFCFTFDYNNFITQNTVMSKSSWSVYTYGVRIKRRFVNGRFSNESDTIDITKDMEKTLEMTDINWRDGHDLRQDIIDYEIVQHIFEIFRLTVQMRNSLSELEDRDYDRLISPVLNENNIFYDSAKAGDALPKDADANGAYCIALKGLYEIKQITENWKEDGKFSRDKLKISNKDWFDFIQNKRYL

SEQ ID NO: 105 - DNA, 3789 bp, synthetic construct
  source 1..3789: mol_type = other DNA
atgaataacggtaccaataactttcaaaattttatcgggatctcctcgttgcaaaaaactcttcgtaatgctttaatcccgactgagacaacacagcagttcatcgttaaaaacggcatcattaaagaagatgagctgcgcggcgagaaccgtcagattttaaaggacatcatggacgactattaccgtgggttcatctcagaaacattaagcagcatcgatgatatcgactggacctcactgtttgagaagatggagattcaacttaagaatggagacaacaaagacactttaattaaggagcagacggaatatcgtaaagctatccataaaaaatttgcaaacgatgaccgtttcaaaaatatgttttccgcaaaattgattagcgacattttacctgaattcgtaatccataacaacaactattccgcatctgaaaaagaggagaagacccaagttatcaaacttttttcacgtttcgcgacatcttttaaagactactttaagaatcgtgcgaattgtttcagtgcagatgatatttcgtctagttcatgtcaccgtatcgtgaatgacaacgctgagattttcttttctaatgcgttggtgtatcgccgcatcgtaaagtccttgtcgaatgatgatatcaacaaaattagtggtgacatgaaagactccctgaaagaaatgtcattagaggagatttacagctacgaaaaatacggagagttcatcactcaggaaggtatctccttttacaacgatatttgcggcaaagttaatagtttcatgaatctgtattgtcagaagaataaggaaaacaagaatctgtacaagttacaaaagcttcataaacagatcttgtgcatcgccgacacgtcttatgaagtcccgtataaatttgaaagcgacgaagaagtatatcagagtgtgaatggattcttggacaatatctcatcaaaacacattgttgaacgtttgcgcaaaatcggcgacaactataacggatacaacttggataaaatttatatcgtatcaaaattttatgaatcagtatcccaaaagacttaccgtgattgggagactattaatacggcgttagaaatccattacaacaacattctgccgggtaacggtaaatcgaaagcggacaaagtgaagaaggcggttaagaacgatcttcagaagtctatcacggagattaatgagctggtttccaattacaagttgtgctcggatgataacatcaaagctgaaacctatatccatgaaatttctcatattcttaataacttcgaggcacaagaattaaaatataacccagaaattcatctggttgagagcgaacttaaagcttcagaattaaaaaatgttttggacgtaattatgaacgccttccattggtgcagcgtgtttatgacagaggagttagtagataaggataacaacttttatgcagaattggaagagatctatgatgagatctatccagtgatttcactgtataacttagtccgtaattacgtcactcagaagccgtactcaactaaaaagatcaagttaaattttggaattccgacattggcggatggttggagtaagtctaaggaatactcaaataacgctattatcttaatgcgtgacaacctgtattacttgggtattttccgtgccaaaaataagcccgataaaaaaatcattgaagggaatacttcagaaaataagggagattacaaaaaaatgatttataaccttttgccaggcccaaacaaaatgatccccaaggtgtttttgagtagtaagacgggagtagaaacatataagccatcagcgtacattcttgaagggtacaaacaaaataaacacatcaagagcagcaaggactttgacattacattttgtcatgacttaatcgactactttaaaaattgcattgccattcaccctgagtggaaaaattttggtttcgacttcagtgatacctctacctatgaagatatctctggtttttatcgtgaggtagaacttcagggttacaagatcgattggacgtacatttccgagaaagacattgatcttttacaagagaagggtcagctttacttatttcagatctacaataaagacttttcgaaaaaatccacgggcaacgacaaccttcatacaatgtacttaaagaacctgttctctgaagaaaacttgaaagatatcgtgcttaaattgaatggcgaggccgagatttttttccgtaaaagctcgattaagaatcccatcatccacaagaaaggcagcattctggtaaatcgtacctatgaagcggaggaaaaggaccaatttggtaatattcagattgtccgtaagaacatccctgaaaatatctatcaagaattatataaatatttcaacgataagtcggacaaggaacttagcgatgaagccgcgaagttgaaaaatgttgttggtcaccacgaagcagcaacaaacattgtgaaagactatcgctacacttacgataagtactttttacatatgcctattacgattaactttaaggcaaataagacaggttttatcaacgaccgtatcctgcaatatattgcaaaagagaaggacctgcatgtcattgggattgatcgcggtgaacgcaatctgatttacgtgagtgttattgatacctgcggtaatattgttgagcaaaagtcttttaatatcgttaatggttacgactaccaaattaagcttaaacaacaggaaggtgcccgccagatcgcccgtaaggagtggaaggaaatcggaaaaattaaggaaatcaaagagggatatctgagcttggttattcatgaaatctcaaagatggttattaagtacaacgccatcatcgctatggaagacttatcgtatgggtttaaaaagggtcgtttcaaagttgagcgccaggtctaccaaaagtttgaaacgatgcttattaataaattaaactacttggttttcaaagatatctctattaccgagaatggaggtttactgaaaggataccagttaacgtatatccccgataagcttaaaaacgtgggccatcagtgtggctgtattttctatgtgcccgcggcatatacatcaaaaattgacccgacgacgggtttcgttaatatcttcaagttcaaagatctgacagttgatgcaaaacgcgaattcattaagaagttcgatagtattcgctatgactccgagaaaaatttgttttgcttcacttttgactacaataactttattactcagaatacagtcatgagtaaaagctcctggtcggtttacacgtacggggtacgcatcaaacgtcgttttgtgaatggtcgttttagtaatgagtcggatacaattgatattaccaaggatatggagaagactctggaaatgacagacatcaattggcgtgatggacatgatttgcgtcaggacattatcgactatgagattgtgcagcatattttcgaaatttttcgcctgacggtgcaaatgcgtaattccttaagcgaactggaagatcgcgactatgaccgcttaatttctcctgtgctgaatgagaacaacatcttctatgactcagcgaaagccggggacgctttgccaaaggatgcagatgctaacggtgcatattgtattgctctgaaaggcctttacgagatcaaacaaattactgaaaactggaaggaagatggaaagttttcccgtgataaattgaagatctctaataaggactggtttgactttatccaaaataaacgttattta

SEQ ID NO: 106 - protein, 1263 aa, synthetic construct
MNNGTNNFQNFIGISSLQKTLRNALIPTETTQQFIVKNGIIKEDELRGENRQILKDIMDDYYRGFISETLSSIDDIDWTSLFEKMEIQLKNGDNKDTLIKEQTEYRKAIHKKFANDDRFKNMFSAKLISDILPEFVIHNNNYSASEKEEKTQVIKLFSRFATSFKDYFKNRANCFSADDISSSSCHRIVNDNAEIFFSNALVYRRIVKSLSNDDINKISGDMKDSLKEMSLEEIYSYEKYGEFITQEGISFYNDICGKVNSFMNLYCQKNKENKNLYKLQKLHKQILCIADTSYEVPYKFESDEEVYQSVNGFLDNISSKHIVERLRKIGDNYNGYNLDKIYIVSKFYESVSQKTYRDWETINTALEIHYNNILPGNGKSKADKVKKAVKNDLQKSITEINELVSNYKLCSDDNIKAETYIHEISHILNNFEAQELKYNPEIHLVESELKASELKNVLDVIMNAFHWCSVFMTEELVDKDNNFYAELEEIYDEIYPVISLYNLVRNYVTQKPYSTKKIKLNFGIPTLADGWSKSKEYSNNAIILMRDNLYYLGIFRAKNKPDKKIIEGNTSENKGDYKKMIYNLLPGPNKMIPKVFLSSKTGVETYKPSAYILEGYKQNKHIKSSKDFDITFCHDLIDYFKNCIAIHPEWKNFGFDFSDTSTYEDISGFYREVELQGYKIDWTYISEKDIDLLQEKGQLYLFQIYNKDFSKKSTGNDNLHTMYLKNLFSEENLKDIVLKLNGEAEIFFRKSSIKNPIIHKKGSILVNRTYEAEEKDQFGNIQIVRKNIPENIYQELYKYFNDKSDKELSDEAAKLKNVVGHHEAATNIVKDYRYTYDKYFLHMPITINFKANKTGFINDRILQYIAKEKDLHVIGIDRGERNLIYVSVIDTCGNIVEQKSFNIVNGYDYQIKLKQQEGARQIARKEWKEIGKIKEIKEGYLSLVIHEISKMVIKYNAIIAMEDLSYGFKKGRFKVERQVYQKFETMLINKLNYLVFKDISITENGGLLKGYQLTYIPDKLKNVGHQCGCIFYVPAAYTSKIDPTTGFVNIFKFKDLTVDAKREFIKKFDSIRYDSEKNLFCFTFDYNNFITQNTVMSKSSWSVYTYGVRIKRRFVNGRFSNESDTIDITKDMEKTLEMTDINWRDGHDLRQDIIDYEIVQHIFEIFRLTVQMRNSLSELEDRDYDRLISPVLNENNIFYDSAKAGDALPKDADANGAYCIALKGLYEIKQITENWKEDGKFSRDKLKISNKDWFDFIQNKRYL

SEQ ID NO: 107 - DNA, 3789 bp, synthetic construct
  source 1..3789: mol_type = other DNA
atgaataacggtaccaataactttcaaaattttatcgggatctcctcgttgcaaaaaactcttcgtaatgctttaatcccgactgagacaacacagcagttcatcgttaaaaacggcatcattaaagaagatgagctgcgcggcgagaaccgtcagattttaaaggacatcatggacgactattaccgtgggttcatctcagaaacattaagcagcatcgatgatatcgactggacctcactgtttgagaagatggagattcaacttaagaatggagacaacaaagacactttaattaaggagcagacggaatatcgtaaagctatccataaaaaatttgcaaacgatgaccgtttcaaaaatatgttttccgcaaaattgattagcgacattttacctgaattcgtaatccataacaacaactattccgcatctgaaaaagaggagaagacccaagttatcaaacttttttcacgtttcgcgacatcttttaaagactactttaagaatcgtgcgaattgtttcagtgcagatgatatttcgtctagttcatgtcaccgtatcgtgaatgacaacgctgagattttcttttctaatgcgttggtgtatcgccgcatcgtaaagtccttgtcgaatgatgatatcaacaaaattagtggtgacatgaaagactccctgaaagaaatgtcattagaggagatttacagctacgaaaaatacggagagttcatcactcaggaaggtatctccttttacaacgatatttgcggcaaagttaatagtttcatgaatctgtattgtcagaagaataaggaaaacaagaatctgtacaagttacaaaagcttcataaacagatcttgtgcatcgccgacacgtcttatgaagtcccgtataaatttgaaagcgacgaagaagtatatcagagtgtgaatggattcttggacaatatctcatcaaaacacattgttgaacgtttgcgcaaaatcggcgacaactataacggatacaacttggataaaatttatatcgtatcaaaattttatgaatcagtatcccaaaagacttaccgtgattgggagactattaatacggcgttagaaatccattacaacaacattctgccgggtaacggtaaatcgaaagcggacaaagtgaagaaggcggttaagaacgatcttcagaagtctatcacggagattaatgagctggtttccaattacaagttgtgctcggatgataacatcaaagctgaaacctatatccatgaaatttctcatattcttaataacttcgaggcacaagaattaaaatataacccagaaattcatctggttgagagcgaacttaaagcttcagaattaaaaaatgttttggacgtaattatgaacgccttccattggtgcagcgtgtttatgacagaggagttagtagataaggataacaacttttatgcagaattggaagagatctatgatgagatctatccagtgatttcactgtataacttagtccgtaattacgtcactcagaagccgtactcaactaaaaagatcaagttaaattttggaattccgacattggcggatggttggagtaagtctaaggaatactcaaataacgctattatcttaatgcgtgacaacctgtattacttgggtattttcgaagccaaaaataagcccgataaaaaaatcattgaagggaatacttcagaaaataagggagattacaaaaaaatgatttataaccttttgccaggcccaaacaaaatgatccccaaggtgtttttgagtagtaagacgggagtagaaacatataagccatcagcgtacattcttgaagggtacaaacaaaataaacacatcaagagcagcaaggactttgacattacattttgtcatgacttaatcgactactttaaaaattgcattgccattcaccctgagtggaaaaattttggtttcgacttcagtgatacctctacctatgaagatatctctggtttttatcgtgaggtagaacttcagggttacaagatcgattggacgtacatttccgagaaagacattgatcttttacaagagaagggtcagctttacttatttcagatctacaataaagacttttcgaaaaaatccacgggcaacgacaaccttcatacaatgtacttaaagaacctgttctctgaagaaaacttgaaagatatcgtgcttaaattgaatggcgaggccgagatttttttccgtaaaagctcgattaagaatcccatcatccacaagaaaggcagcattctggtaaatcgtacctatgaagcggaggaaaaggaccaatttggtaatattcagattgtccgtaagaacatccctgaaaatatctatcaagaattatataaatatttcaacgataagtcggacaaggaacttagcgatgaagccgcgaagttgaaaaatgttgttggtcaccacgaagcagcaacaaacattgtgaaagactatcgctacacttacgataagtactttttacatatgcctattacgattaactttaaggcaaataagacaggttttatcaacgaccgtatcctgcaatatattgcaaaagagaaggacctgcatgtcattgggattgatcgcggtgaacgcaatctgatttacgtgagtgttattgatacctgcggtaatattgttgagcaaaagtcttttaatatcgttaatggttacgactaccaaattaagcttaaacaacaggaaggtgcccgccagatcgcccgtaaggagtggaaggaaatcggaaaaattaaggaaatcaaagagggatatctgagcttggttattcatgaaatctcaaagatggttattaagtacaacgccatcatcgctatggaagacttatcgtatgggtttaaaaagggtcgtttcaaagttgagcgccaggtctaccaaaagtttgaaacgatgcttattaataaattaaactacttggttttcaaagatatctctattaccgagaatggaggtttactgaaaggataccagttaacgtatatccccgataagcttaaaaacgtgggccatcagtgtggctgtattttctatgtgcccgcggcatatacatcaaaaattgacccgacgacgggtttcgttaatatcttcaagttcaaagatctgacagttgatgcaaaacgcgaattcattaagaagttcgatagtattcgctatgactccgagaaaaatttgttttgcttcacttttgactacaataactttattactcagaatacagtcatgagtaaaagctcctggtcggtttacacgtacggggtacgcatcaaacgtcgttttgtgaatggtcgttttagtaatgagtcggatacaattgatattaccaaggatatggagaagactctggaaatgacagacatcaattggcgtgatggacatgatttgcgtcaggacattatcgactatgagattgtgcagcatattttcgaaatttttcgcctgacggtgcaaatgcgtaattccttaagcgaactggaagatcgcgactatgaccgcttaatttctcctgtgctgaatgagaacaacatcttctatgactcagcgaaagccggggacgctttgccaaaggatgcagatgctaacggtgcatattgtattgctctgaaaggcctttacgagatcaaacaaattactgaaaactggaaggaagatggaaagttttcccgtgataaattgaagatctctaataaggactggtttgactttatccaaaataaacgttattta

SEQ ID NO: 108 - protein, 1263 aa, synthetic construct
MNNGTNNFQNFIGISSLQKTLRNALIPTETTQQFIVKNGIIKEDELRGENRQILKDIMDDYYRGFISETLSSIDDIDWTSLFEKMEIQLKNGDNKDTLIKEQTEYRKAIHKKFANDDRFKNMFSAKLISDILPEFVIHNNNYSASEKEEKTQVIKLFSRFATSFKDYFKNRANCFSADDISSSSCHRIVNDNAEIFFSNALVYRRIVKSLSNDDINKISGDMKDSLKEMSLEEIYSYEKYGEFITQEGISFYNDICGKVNSFMNLYCQKNKENKNLYKLQKLHKQILCIADTSYEVPYKFESDEEVYQSVNGFLDNISSKHIVERLRKIGDNYNGYNLDKIYIVSKFYESVSQKTYRDWETINTALEIHYNNILPGNGKSKADKVKKAVKNDLQKSITEINELVSNYKLCSDDNIKAETYIHEISHILNNFEAQELKYNPEIHLVESELKASELKNVLDVIMNAFHWCSVFMTEELVDKDNNFYAELEEIYDEIYPVISLYNLVRNYVTQKPYSTKKIKLNFGIPTLADGWSKSKEYSNNAIILMRDNLYYLGIFEAKNKPDKKIIEGNTSENKGDYKKMIYNLLPGPNKMIPKVFLSSKTGVETYKPSAYILEGYKQNKHIKSSKDFDITFCHDLIDYFKNCIAIHPEWKNFGFDFSDTSTYEDISGFYREVELQGYKIDWTYISEKDIDLLQEKGQLYLFQIYNKDFSKKSTGNDNLHTMYLKNLFSEENLKDIVLKLNGEAEIFFRKSSIKNPIIHKKGSILVNRTYEAEEKDQFGNIQIVRKNIPENIYQELYKYFNDKSDKELSDEAAKLKNVVGHHEAATNIVKDYRYTYDKYFLHMPITINFKANKTGFINDRILQYIAKEKDLHVIGIDRGERNLIYVSVIDTCGNIVEQKSFNIVNGYDYQIKLKQQEGARQIARKEWKEIGKIKEIKEGYLSLVIHEISKMVIKYNAIIAMEDLSYGFKKGRFKVERQVYQKFETMLINKLNYLVFKDISITENGGLLKGYQLTYIPDKLKNVGHQCGCIFYVPAAYTSKIDPTTGFVNIFKFKDLTVDAKREFIKKFDSIRYDSEKNLFCFTFDYNNFITQNTVMSKSSWSVYTYGVRIKRRFVNGRFSNESDTIDITKDMEKTLEMTDINWRDGHDLRQDIIDYEIVQHIFEIFRLTVQMRNSLSELEDRDYDRLISPVLNENNIFYDSAKAGDALPKDADANGAYCIALKGLYEIKQITENWKEDGKFSRDKLKISNKDWFDFIQNKRYL

SEQ ID NO: 109 - DNA, 3789 bp, synthetic construct
  source 1..3789: mol_type = other DNA
atgaataacggtaccaataactttcaaaattttatcgggatctcctcgttgcaaaaaactcttcgtaatgctttaatcccgactgagacaacacagcagttcatcgttaaaaacggcatcattaaagaagatgagctgcgcggcgagaaccgtcagattttaaaggacatcatggacgactattaccgtgggttcatctcagaaacattaagcagcatcgatgatatcgactggacctcactgtttgagaagatggagattcaacttaagaatggagacaacaaagacactttaattaaggagcagacggaatatcgtaaagctatccataaaaaatttgcaaacgatgaccgtttcaaaaatatgttttccgcaaaattgattagcgacattttacctgaattcgtaatccataacaacaactattccgcatctgaaaaagaggagaagacccaagttatcaaacttttttcacgtttcgcgacatcttttaaagactactttaagaatcgtgcgaattgtttcagtgcagatgatatttcgtctagttcatgtcaccgtatcgtgaatgacaacgctgagattttcttttctaatgcgttggtgtatcgccgcatcgtaaagtccttgtcgaatgatgatatcaacaaaattagtggtgacatgaaagactccctgaaagaaatgtcattagaggagatttacagctacgaaaaatacggagagttcatcactcaggaaggtatctccttttacaacgatatttgcggcaaagttaatagtttcatgaatctgtattgtcagaagaataaggaaaacaagaatctgtacaagttacaaaagcttcataaacagatcttgtgcatcgccgacacgtcttatgaagtcccgtataaatttgaaagcgacgaagaagtatatcagagtgtgaatggattcttggacaatatctcatcaaaacacattgttgaacgtttgcgcaaaatcggcgacaactataacggatacaacttggataaaatttatatcgtatcaaaattttatgaatcagtatcccaaaagacttaccgtgattgggagactattaatacggcgttagaaatccattacaacaacattctgccgggtaacggtaaatcgaaagcggacaaagtgaagaaggcggttaagaacgatcttcagaagtctatcacggagattaatgagctggtttccaattacaagttgtgctcggatgataacatcaaagctgaaacctatatccatgaaatttctcatattcttaataacttcgaggcacaagaattaaaatataacccagaaattcatctggttgagagcgaacttaaagcttcagaattaaaaaatgttttggacgtaattatgaacgccttccattggtgcagcgtgtttatgacagaggagttagtagataaggataacaacttttatgcagaattggaagagatctatgatgagatctatccagtgatttcactgtataacttagtccgtaattacgtcactcagaagccgtactcaactaaaaagatcaagttaaattttggaattccgacattggcggatggttggagtaagtctaaggaatactcaaataacgctattatcttaatgcgtgacaacctgtattacttgggtattttcaatgccaaaaataagcccgtgaaaaaaatcattgaagggaatacttcagaaaataagggagattacaaaaaaatgatttataaccttttgccaggcccaaacaaaatgatccccaaggtgtttttgagtagtaagacgggagtagaaacatataagccatcagcgtacattcttgaagggtacaaacaaaataaacacatcaagagcagcaaggactttgacattacattttgtcatgacttaatcgactactttaaaaattgcattgccattcaccctgagtggaaaaattttggtttcgacttcagtgatacctctacctatgaagatatctctggtttttatcgtgaggtagaacttcagggttacaagatcgattggacgtacatttccgagaaagacattgatcttttacaagagaagggtcagctttacttatttcagatctacaataaagacttttcgaaaaaatccacgggcaacgacaaccttcatacaatgtacttaaagaacctgttctctgaagaaaacttgaaagatatcgtgcttaaattgaatggcgaggccgagatttttttccgtaaaagctcgattaagaatcccatcatccacaagaaaggcagcattctggtaaatcgtacctatgaagcggaggaaaaggaccaatttggtaatattcagattgtccgtaagaacatccctgaaaatatctatcaagaattatataaatatttcaacgataagtcggacaaggaacttagcgatgaagccgcgaagttgaaaaatgttgttggtcaccacgaagcagcaacaaacattgtgaaagactatcgctacacttacgataagtactttttacatatgcctattacgattaactttaaggcaaataagacaggttttatcaacgaccgtatcctgcaatatattgcaaaagagaaggacctgcatgtcattgggattgatcgcggtgaacgcaatctgatttacgtgagtgttattgatacctgcggtaatattgttgagcaaaagtcttttaatatcgttaatggttacgactaccaaattaagcttaaacaacaggaaggtgcccgccagatcgcccgtaaggagtggaaggaaatcggaaaaattaaggaaatcaaagagggatatctgagcttggttattcatgaaatctcaaagatggttattaagtacaacgccatcatcgctatggaagacttatcgtatgggtttaaaaagggtcgtttcaaagttgagcgccaggtctaccaaaagtttgaaacgatgcttattaataaattaaactacttggttttcaaagatatctctattaccgagaatggaggtttactgaaaggataccagttaacgtatatccccgataagcttaaaaacgtgggccatcagtgtggctgtattttctatgtgcccgcggcatatacatcaaaaattgacccgacgacgggtttcgttaatatcttcaagttcaaagatctgacagttgatgcaaaacgcgaattcattaagaagttcgatagtattcgctatgactccgagaaaaatttgttttgcttcacttttgactacaataactttattactcagaatacagtcatgagtaaaagctcctggtcggtttacacgtacggggtacgcatcaaacgtcgttttgtgaatggtcgttttagtaatgagtcggatacaattgatattaccaaggatatggagaagactctggaaatgacagacatcaattggcgtgatggacatgatttgcgtcaggacattatcgactatgagattgtgcagcatattttcgaaatttttcgcctgacggtgcaaatgcgtaattccttaagcgaactggaagatcgcgactatgaccgcttaatttctcctgtgctgaatgagaacaacatcttctatgactcagcgaaagccggggacgctttgccaaaggatgcagatgctaacggtgcatattgtattgctctgaaaggcctttacgagatcaaacaaattactgaaaactggaaggaagatggaaagttttcccgtgataaattgaagatctctaataaggactggtttgactttatccaaaataaacgttattta

SEQ ID NO: 110 - protein, 1263 aa, synthetic construct
MNNGTNNFQNFIGISSLQKTLRNALIPTETTQQFIVKNGIIKEDELRGENRQILKDIMDDYYRGFISETLSSIDDIDWTSLFEKMEIQLKNGDNKDTLIKEQTEYRKAIHKKFANDDRFKNMFSAKLISDILPEFVIHNNNYSASEKEEKTQVIKLFSRFATSFKDYFKNRANCFSADDISSSSCHRIVNDNAEIFFSNALVYRRIVKSLSNDDINKISGDMKDSLKEMSLEEIYSYEKYGEFITQEGISFYNDICGKVNSFMNLYCQKNKENKNLYKLQKLHKQILCIADTSYEVPYKFESDEEVYQSVNGFLDNISSKHIVERLRKIGDNYNGYNLDKIYIVSKFYESVSQKTYRDWETINTALEIHYNNILPGNGKSKADKVKKAVKNDLQKSITEINELVSNYKLCSDDNIKAETYIHEISHILNNFEAQELKYNPEIHLVESELKASELKNVLDVIMNAFHWCSVFMTEELVDKDNNFYAELEEIYDEIYPVISLYNLVRNYVTQKPYSTKKIKLNFGIPTLADGWSKSKEYSNNAIILMRDNLYYLGIFNAKNKPVKKIIEGNTSENKGDYKKMIYNLLPGPNKMIPKVFLSSKTGVETYKPSAYILEGYKQNKHIKSSKDFDITFCHDLIDYFKNCIAIHPEWKNFGFDFSDTSTYEDISGFYREVELQGYKIDWTYISEKDIDLLQEKGQLYLFQIYNKDFSKKSTGNDNLHTMYLKNLFSEENLKDIVLKLNGEAEIFFRKSSIKNPIIHKKGSILVNRTYEAEEKDQFGNIQIVRKNIPENIYQELYKYFNDKSDKELSDEAAKLKNVVGHHEAATNIVKDYRYTYDKYFLHMPITINFKANKTGFINDRILQYIAKEKDLHVIGIDRGERNLIYVSVIDTCGNIVEQKSFNIVNGYDYQIKLKQQEGARQIARKEWKEIGKIKEIKEGYLSLVIHEISKMVIKYNAIIAMEDLSYGFKKGRFKVERQVYQKFETMLINKLNYLVFKDISITENGGLLKGYQLTYIPDKLKNVGHQCGCIFYVPAAYTSKIDPTTGFVNIFKFKDLTVDAKREFIKKFDSIRYDSEKNLFCFTFDYNNFITQNTVMSKSSWSVYTYGVRIKRRFVNGRFSNESDTIDITKDMEKTLEMTDINWRDGHDLRQDIIDYEIVQHIFEIFRLTVQMRNSLSELEDRDYDRLISPVLNENNIFYDSAKAGDALPKDADANGAYCIALKGLYEIKQITENWKEDGKFSRDKLKISNKDWFDFIQNKRYL

SEQ ID NO: 111 - DNA, 3789 bp, synthetic construct
  source 1..3789: mol_type = other DNA
atgaataacggtaccaataactttcaaaattttatcgggatctcctcgttgcaaaaaactcttcgtaatgctttaatcccgactgagacaacacagcagttcatcgttaaaaacggcatcattaaagaagatgagctgcgcggcgagaaccgtcagattttaaaggacatcatggacgactattaccgtgggttcatctcagaaacattaagcagcatcgatgatatcgactggacctcactgtttgagaagatggagattcaacttaagaatggagacaacaaagacactttaattaaggagcagacggaatatcgtaaagctatccataaaaaatttgcaaacgatgaccgtttcaaaaatatgttttccgcaaaattgattagcgacattttacctgaattcgtaatccataacaacaactattccgcatctgaaaaagaggagaagacccaagttatcaaacttttttcacgtttcgcgacatcttttaaagactactttaagaatcgtgcgaattgtttcagtgcagatgatatttcgtctagttcatgtcaccgtatcgtgaatgacaacgctgagattttcttttctaatgcgttggtgtatcgccgcatcgtaaagtccttgtcgaatgatgatatcaacaaaattagtggtgacatgaaagactccctgaaagaaatgtcattagaggagatttacagctacgaaaaatacggagagttcatcactcaggaaggtatctccttttacaacgatatttgcggcaaagttaatagtttcatgaatctgtattgtcagaagaataaggaaaacaagaatctgtacaagttacaaaagcttcataaacagatcttgtgcatcgccgacacgtcttatgaagtcccgtataaatttgaaagcgacgaagaagtatatcagagtgtgaatggattcttggacaatatctcatcaaaacacattgttgaacgtttgcgcaaaatcggcgacaactataacggatacaacttggataaaatttatatcgtatcaaaattttatgaatcagtatcccaaaagacttaccgtgattgggagactattaatacggcgttagaaatccattacaacaacattctgccgggtaacggtaaatcgaaagcggacaaagtgaagaaggcggttaagaacgatcttcagaagtctatcacggagattaatgagctggtttccaattacaagttgtgctcggatgataacatcaaagctgaaacctatatccatgaaatttctcatattcttaataacttcgaggcacaagaattaaaatataacccagaaattcatctggttgagagcgaacttaaagcttcagaattaaaaaatgttttggacgtaattatgaacgccttccattggtgcagcgtgtttatgacagaggagttagtagataaggataacaacttttatgcagaattggaagagatctatgatgagatctatccagtgatttcactgtataacttagtccgtaattacgtcactcagaagccgtactcaactaaaaagatcaagttaaattttggaattccgacattggcggatggttggagtaagtctaaggaatactcaaataacgctattatcttaatgcgtgacaacctgtattacttgggtattttcaatgccaaaaataagcccaaaaaaaaaatcattgaagggaatacttcagaaaataagggagattacaaaaaaatgatttataaccttttgccaggcccaaacaaaatgatccccaaggtgtttttgagtagtaagacgggagtagaaacatataagccatcagcgtacattcttgaagggtacaaacaaaataaacacatcaagagcagcaaggactttgacattacattttgtcatgacttaatcgactactttaaaaattgcattgccattcaccctgagtggaaaaattttggtttcgacttcagtgatacctctacctatgaagatatctctggtttttatcgtgaggtagaacttcagggttacaagatcgattggacgtacatttccgagaaagacattgatcttttacaagagaagggtcagctttacttatttcagatctacaataaagacttttcgaaaaaatccacgggcaacgacaaccttcatacaatgtacttaaagaacctgttctctgaagaaaacttgaaagatatcgtgcttaaattgaatggcgaggccgagatttttttccgtaaaagctcgattaagaatcccatcatccacaagaaaggcagcattctggtaaatcgtacctatgaagcggaggaaaaggaccaatttggtaatattcagattgtccgtaagaacatccctgaaaatatctatcaagaattatataaatatttcaacgataagtcggacaaggaacttagcgatgaagccgcgaagttgaaaaatgttgttggtcaccacgaagcagcaacaaacattgtgaaagactatcgctacacttacgataagtactttttacatatgcctattacgattaactttaaggcaaataagacaggttttatcaacgaccgtatcctgcaatatattgcaaaagagaaggacctgcatgtcattgggattgatcgcggtgaacgcaatctgatttacgtgagtgttattgatacctgcggtaatattgttgagcaaaagtcttttaatatcgttaatggttacgactaccaaattaagcttaaacaacaggaaggtgcccgccagatcgcccgtaaggagtggaaggaaatcggaaaaattaaggaaatcaaagagggatatctgagcttggttattcatgaaatctcaaagatggttattaagtacaacgccatcatcgctatggaagacttatcgtatgggtttaaaaagggtcgtttcaaagttgagcgccaggtctaccaaaagtttgaaacgatgcttattaataaattaaactacttggttttcaaagatatctctattaccgagaatggaggtttactgaaaggataccagttaacgtatatccccgataagcttaaaaacgtgggccatcagtgtggctgtattttctatgtgcccgcggcatatacatcaaaaattgacccgacgacgggtttcgttaatatcttcaagttcaaagatctgacagttgatgcaaaacgcgaattcattaagaagttcgatagtattcgctatgactccgagaaaaatttgttttgcttcacttttgactacaataactttattactcagaatacagtcatgagtaaaagctcctggtcggtttacacgtacggggtacgcatcaaacgtcgttttgtgaatggtcgttttagtaatgagtcggatacaattgatattaccaaggatatggagaagactctggaaatgacagacatcaattggcgtgatggacatgatttgcgtcaggacattatcgactatgagattgtgcagcatattttcgaaatttttcgcctgacggtgcaaatgcgtaattccttaagcgaactggaagatcgcgactatgaccgcttaatttctcctgtgctgaatgagaacaacatcttctatgactcagcgaaagccggggacgctttgccaaaggatgcagatgctaacggtgcatattgtattgctctgaaaggcctttacgagatcaaacaaattactgaaaactggaaggaagatggaaagttttcccgtgataaattgaagatctctaataaggactggtttgactttatccaaaataaacgttattta

SEQ ID NO: 112 - protein, 1263 aa, synthetic construct
MNNGTNNFQNFIGISSLQKTLRNALIPTETTQQFIVKNGIIKEDELRGENRQILKDIMDDYYRGFISETLSSIDDIDWTSLFEKMEIQLKNGDNKDTLIKEQTEYRKAIHKKFANDDRFKNMFSAKLISDILPEFVIHNNNYSASEKEEKTQVIKLFSRFATSFKDYFKNRANCFSADDISSSSCHRIVNDNAEIFFSNALVYRRIVKSLSNDDINKISGDMKDSLKEMSLEEIYSYEKYGEFITQEGISFYNDICGKVNSFMNLYCQKNKENKNLYKLQKLHKQILCIADTSYEVPYKFESDEEVYQSVNGFLDNISSKHIVERLRKIGDNYNGYNLDKIYIVSKFYESVSQKTYRDWETINTALEIHYNNILPGNGKSKADKVKKAVKNDLQKSITEINELVSNYKLCSDDNIKAETYIHEISHILNNFEAQELKYNPEIHLVESELKASELKNVLDVIMNAFHWCSVFMTEELVDKDNNFYAELEEIYDEIYPVISLYNLVRNYVTQKPYSTKKIKLNFGIPTLADGWSKSKEYSNNAIILMRDNLYYLGIFNAKNKPKKKIIEGNTSENKGDYKKMIYNLLPGPNKMIPKVFLSSKTGVETYKPSAYILEGYKQNKHIKSSKDFDITFCHDLIDYFKNCIAIHPEWKNFGFDFSDTSTYEDISGFYREVELQGYKIDWTYISEKDIDLLQEKGQLYLFQIYNKDFSKKSTGNDNLHTMYLKNLFSEENLKDIVLKLNGEAEIFFRKSSIKNPIIHKKGSILVNRTYEAEEKDQFGNIQIVRKNIPENIYQELYKYFNDKSDKELSDEAAKLKNVVGHHEAATNIVKDYRYTYDKYFLHMPITINFKANKTGFINDRILQYIAKEKDLHVIGIDRGERNLIYVSVIDTCGNIVEQKSFNIVNGYDYQIKLKQQEGARQIARKEWKEIGKIKEIKEGYLSLVIHEISKMVIKYNAIIAMEDLSYGFKKGRFKVERQVYQKFETMLINKLNYLVFKDISITENGGLLKGYQLTYIPDKLKNVGHQCGCIFYVPAAYTSKIDPTTGFVNIFKFKDLTVDAKREFIKKFDSIRYDSEKNLFCFTFDYNNFITQNTVMSKSSWSVYTYGVRIKRRFVNGRFSNESDTIDITKDMEKTLEMTDINWRDGHDLRQDIIDYEIVQHIFEIFRLTVQMRNSLSELEDRDYDRLISPVLNENNIFYDSAKAGDALPKDADANGAYCIALKGLYEIKQITENWKEDGKFSRDKLKISNKDWFDFIQNKRYL

SEQ ID NO: 113 - DNA, 3789 bp, synthetic construct
  source 1..3789: mol_type = other DNA
atgaataacggtaccaataactttcaaaattttatcgggatctcctcgttgcaaaaaactcttcgtaatgctttaatcccgactgagacaacacagcagttcatcgttaaaaacggcatcattaaagaagatgagctgcgcggcgagaaccgtcagattttaaaggacatcatggacgactattaccgtgggttcatctcagaaacattaagcagcatcgatgatatcgactggacctcactgtttgagaagatggagattcaacttaagaatggagacaacaaagacactttaattaaggagcagacggaatatcgtaaagctatccataaaaaatttgcaaacgatgaccgtttcaaaaatatgttttccgcaaaattgattagcgacattttacctgaattcgtaatccataacaacaactattccgcatctgaaaaagaggagaagacccaagttatcaaacttttttcacgtttcgcgacatcttttaaagactactttaagaatcgtgcgaattgtttcagtgcagatgatatttcgtctagttcatgtcaccgtatcgtgaatgacaacgctgagattttcttttctaatgcgttggtgtatcgccgcatcgtaaagtccttgtcgaatgatgatatcaacaaaattagtggtgacatgaaagactccctgaaagaaatgtcattagaggagatttacagctacgaaaaatacggagagttcatcactcaggaaggtatctccttttacaacgatatttgcggcaaagttaatagtttcatgaatctgtattgtcagaagaataaggaaaacaagaatctgtacaagttacaaaagcttcataaacagatcttgtgcatcgccgacacgtcttatgaagtcccgtataaatttgaaagcgacgaagaagtatatcagagtgtgaatggattcttggacaatatctcatcaaaacacattgttgaacgtttgcgcaaaatcggcgacaactataacggatacaacttggataaaatttatatcgtatcaaaattttatgaatcagtatcccaaaagacttaccgtgattgggagactattaatacggcgttagaaatccattacaacaacattctgccgggtaacggtaaatcgaaagcggacaaagtgaagaaggcggttaagaacgatcttcagaagtctatcacggagattaatgagctggtttccaattacaagttgtgctcggatgataacatcaaagctgaaacctatatccatgaaatttctcatattcttaataacttcgaggcacaagaattaaaatataacccagaaattcatctggttgagagcgaacttaaagcttcagaattaaaaaatgttttggacgtaattatgaacgccttccattggtgcagcgtgtttatgacagaggagttagtagataaggataacaacttttatgcagaattggaagagatctatgatgagatctatccagtgatttcactgtataacttagtccgtaattacgtcactcagaagccgtactcaactaaaaagatcaagttaaattttggaattccgacattggcggatggttggagtaagtctaaggaatactcaaataacgctattatcttaatgcgtgacaacctgtattacttgggtattttcaatgccaaaaataagcccattaaaaaaatcattgaagggaatacttcagaaaataagggagattacaaaaaaatgatttataaccttttgccaggcccaaacaaaatgatccccaaggtgtttttgagtagtaagacgggagtagaaacatataagccatcagcgtacattcttgaagggtacaaacaaaataaacacatcaagagcagcaaggactttgacattacattttgtcatgacttaatcgactactttaaaaattgcattgccattcaccctgagtggaaaaattttggtttcgacttcagtgatacctctacctatgaagatatctctggtttttatcgtgaggtagaacttcagggttacaagatcgattggacgtacatttccgagaaagacattgatcttttacaagagaagggtcagctttacttatttcagatctacaataaagacttttcgaaaaaatccacgggcaacgacaaccttcatacaatgtacttaaagaacctgttctctgaagaaaacttgaaagatatcgtgcttaaattgaatggcgaggccgagatttttttccgtaaaagctcgattaagaatcccatcatccacaagaaaggcagcattctggtaaatcgtacctatgaagcggaggaaaaggaccaatttggtaatattcagattgtccgtaagaacatccctgaaaatatctatcaagaattatataaatatttcaacgataagtcggacaaggaacttagcgatgaagccgcgaagttgaaaaatgttgttggtcaccacgaagcagcaacaaacattgtgaaagactatcgctacacttacgataagtactttttacatatgcctattacgattaactttaaggcaaataagacaggttttatcaacgaccgtatcctgcaatatattgcaaaagagaaggacctgcatgtcattgggattgatcgcggtgaacgcaatctgatttacgtgagtgttattgatacctgcggtaatattgttgagcaaaagtcttttaatatcgttaatggttacgactaccaaattaagcttaaacaacaggaaggtgcccgccagatcgcccgtaaggagtggaaggaaatcggaaaaattaaggaaatcaaagagggatatctgagcttggttattcatgaaatctcaaagatggttattaagtacaacgccatcatcgctatggaagacttatcgtatgggtttaaaaagggtcgtttcaaagttgagcgccaggtctaccaaaagtttgaaacgatgcttattaataaattaaactacttggttttcaaagatatctctattaccgagaatggaggtttactgaaaggataccagttaacgtatatccccgataagcttaaaaacgtgggccatcagtgtggctgtattttctatgtgcccgcggcatatacatcaaaaattgacccgacgacgggtttcgttaatatcttcaagttcaaagatctgacagttgatgcaaaacgcgaattcattaagaagttcgatagtattcgctatgactccgagaaaaatttgttttgcttcacttttgactacaataactttattactcagaatacagtcatgagtaaaagctcctggtcggtttacacgtacggggtacgcatcaaacgtcgttttgtgaatggtcgttttagtaatgagtcggatacaattgatattaccaaggatatggagaagactctggaaatgacagacatcaattggcgtgatggacatgatttgcgtcaggacattatcgactatgagattgtgcagcatattttcgaaatttttcgcctgacggtgcaaatgcgtaattccttaagcgaactggaagatcgcgactatgaccgcttaatttctcctgtgctgaatgagaacaacatcttctatgactcagcgaaagccggggacgctttgccaaaggatgcagatgctaacggtgcatattgtattgctctgaaaggcctttacgagatcaaacaaattactgaaaactggaaggaagatggaaagttttcccgtgataaattgaagatctctaataaggactggtttgactttatccaaaataaacgttattta

SEQ ID NO: 114 - protein, 1263 aa, synthetic construct
MNNGTNNFQNFIGISSLQKTLRNALIPTETTQQFIVKNGIIKEDELRGENRQILKDIMDDYYRGFISETLSSIDDIDWTSLFEKMEIQLKNGDNKDTLIKEQTEYRKAIHKKFANDDRFKNMFSAKLISDILPEFVIHNNNYSASEKEEKTQVIKLFSRFATSFKDYFKNRANCFSADDISSSSCHRIVNDNAEIFFSNALVYRRIVKSLSNDDINKISGDMKDSLKEMSLEEIYSYEKYGEFITQEGISFYNDICGKVNSFMNLYCQKNKENKNLYKLQKLHKQILCIADTSYEVPYKFESDEEVYQSVNGFLDNISSKHIVERLRKIGDNYNGYNLDKIYIVSKFYESVSQKTYRDWETINTALEIHYNNILPGNGKSKADKVKKAVKNDLQKSITEINELVSNYKLCSDDNIKAETYIHEISHILNNFEAQELKYNPEIHLVESELKASELKNVLDVIMNAFHWCSVFMTEELVDKDNNFYAELEEIYDEIYPVISLYNLVRNYVTQKPYSTKKIKLNFGIPTLADGWSKSKEYSNNAIILMRDNLYYLGIFNAKNKPIKKIIEGNTSENKGDYKKMIYNLLPGPNKMIPKVFLSSKTGVETYKPSAYILEGYKQNKHIKSSKDFDITFCHDLIDYFKNCIAIHPEWKNFGFDFSDTSTYEDISGFYREVELQGYKIDWTYISEKDIDLLQEKGQLYLFQIYNKDFSKKSTGNDNLHTMYLKNLFSEENLKDIVLKLNGEAEIFFRKSSIKNPIIHKKGSILVNRTYEAEEKDQFGNIQIVRKNIPENIYQELYKYFNDKSDKELSDEAAKLKNVVGHHEAATNIVKDYRYTYDKYFLHMPITINFKANKTGFINDRILQYIAKEKDLHVIGIDRGERNLIYVSVIDTCGNIVEQKSFNIVNGYDYQIKLKQQEGARQIARKEWKEIGKIKEIKEGYLSLVIHEISKMVIKYNAIIAMEDLSYGFKKGRFKVERQVYQKFETMLINKLNYLVFKDISITENGGLLKGYQLTYIPDKLKNVGHQCGCIFYVPAAYTSKIDPTTGFVNIFKFKDLTVDAKREFIKKFDSIRYDSEKNLFCFTFDYNNFITQNTVMSKSSWSVYTYGVRIKRRFVNGRFSNESDTIDITKDMEKTLEMTDINWRDGHDLRQDIIDYEIVQHIFEIFRLTVQMRNSLSELEDRDYDRLISPVLNENNIFYDSAKAGDALPKDADANGAYCIALKGLYEIKQITENWKEDGKFSRDKLKISNKDWFDFIQNKRYL

SEQ ID NO: 115 - DNA, 3789 bp, synthetic construct
  source 1..3789: mol_type = other DNA
atgaataacggtaccaataactttcaaaattttatcgggatctcctcgttgcaaaaaactcttcgtaatgctttaatcccgactgagacaacacagcagttcatcgttaaaaacggcatcattaaagaagatgagctgcgcggcgagaaccgtcagattttaaaggacatcatggacgactattaccgtgggttcatctcagaaacattaagcagcatcgatgatatcgactggacctcactgtttgagaagatggagattcaacttaagaatggagacaacaaagacactttaattaaggagcagacggaatatcgtaaagctatccataaaaaatttgcaaacgatgaccgtttcaaaaatatgttttccgcaaaattgattagcgacattttacctgaattcgtaatccataacaacaactattccgcatctgaaaaagaggagaagacccaagttatcaaacttttttcacgtttcgcgacatcttttaaagactactttaagaatcgtgcgaattgtttcagtgcagatgatatttcgtctagttcatgtcaccgtatcgtgaatgacaacgctgagattttcttttctaatgcgttggtgtatcgccgcatcgtaaagtccttgtcgaatgatgatatcaacaaaattagtggtgacatgaaagactccctgaaagaaatgtcattagaggagatttacagctacgaaaaatacggagagttcatcactcaggaaggtatctccttttacaacgatatttgcggcaaagttaatagtttcatgaatctgtattgtcagaagaataaggaaaacaagaatctgtacaagttacaaaagcttcataaacagatcttgtgcatcgccgacacgtcttatgaagtcccgtataaatttgaaagcgacgaagaagtatatcagagtgtgaatggattcttggacaatatctcatcaaaacacattgttgaacgtttgcgcaaaatcggcgacaactataacggatacaacttggataaaatttatatcgtatcaaaattttatgaatcagtatcccaaaagacttaccgtgattgggagactattaatacggcgttagaaatccattacaacaacattctgccgggtaacggtaaatcgaaagcggacaaagtgaagaaggcggttaagaacgatcttcagaagtctatcacggagattaatgagctggtttccaattacaagttgtgctcggatgataacatcaaagctgaaacctatatccatgaaatttctcatattcttaataacttcgaggcacaagaattaaaatataacccagaaattcatctggttgagagcgaacttaaagcttcagaattaaaaaatgttttggacgtaattatgaacgccttccattggtgcagcgtgtttatgacagaggagttagtagataaggataacaacttttatgcagaattggaagagatctatgatgagatctatccagtgatttcactgtataacttagtccgtaattacgtcactcagaagccgtactcaactaaaaagatcaagttaaattttggaattccgacattggcggatggttggagtaagtctaaggaatactcaaataacgctattatcttaatgcgtgacaacctgtattacttgggtattttcaatgccaaaaataagcccgataaaaaaatcattgaagggaatacttcagaaaataagggagattacaaaaaaatgatttatgtgcttttgccaggcccaaacaaaatgatccccaaggtgtttttgagtagtaagacgggagtagaaacatataagccatcagcgtacattcttgaagggtacaaacaaaataaacacatcaagagcagcaaggactttgacattacattttgtcatgacttaatcgactactttaaaaattgcattgccattcaccctgagtggaaaaattttggtttcgacttcagtgatacctctacctatgaagatatctctggtttttatcgtgaggtagaacttcagggttacaagatcgattggacgtacatttccgagaaagacattgatcttttacaagagaagggtcagctttacttatttcagatctacaataaagacttttcgaaaaaatccacgggcaacgacaaccttcatacaatgtacttaaagaacctgttctctgaagaaaacttgaaagatatcgtgcttaaattgaatggcgaggccgagatttttttccgtaaaagctcgattaagaatcccatcatccacaagaaaggcagcattctggtaaatcgtacctatgaagcggaggaaaaggaccaatttggtaatattcagattgtccgtaagaacatccctgaaaatatctatcaagaattatataaatatttcaacgataagtcggacaaggaacttagcgatgaagccgcgaagttgaaaaatgttgttggtcaccacgaagcagcaacaaacattgtgaaagactatcgctacacttacgataagtactttttacatatgcctattacgattaactttaaggcaaataagacaggttttatcaacgaccgtatcctgcaatatattgcaaaagagaaggacctgcatgtcattgggattgatcgcggtgaacgcaatctgatttacgtgagtgttattgatacctgcggtaatattgttgagcaaaagtcttttaatatcgttaatggttacgactaccaaattaagcttaaacaacaggaaggtgcccgccagatcgcccgtaaggagtggaaggaaatcggaaaaattaaggaaatcaaagagggatatctgagcttggttattcatgaaatctcaaagatggttattaagtacaacgccatcatcgctatggaagacttatcgtatgggtttaaaaagggtcgtttcaaagttgagcgccaggtctaccaaaagtttgaaacgatgcttattaataaattaaactacttggttttcaaagatatctctattaccgagaatggaggtttactgaaaggataccagttaacgtatatccccgataagcttaaaaacgtgggccatcagtgtggctgtattttctatgtgcccgcggcatatacatcaaaaattgacccgacgacgggtttcgttaatatcttcaagttcaaagatctgacagttgatgcaaaacgcgaattcattaagaagttcgatagtattcgctatgactccgagaaaaatttgttttgcttcacttttgactacaataactttattactcagaatacagtcatgagtaaaagctcctggtcggtttacacgtacggggtacgcatcaaacgtcgttttgtgaatggtcgttttagtaatgagtcggatacaattgatattaccaaggatatggagaagactctggaaatgacagacatcaattggcgtgatggacatgatttgcgtcaggacattatcgactatgagattgtgcagcatattttcgaaatttttcgcctgacggtgcaaatgcgtaattccttaagcgaactggaagatcgcgactatgaccgcttaatttctcctgtgctgaatgagaacaacatcttctatgactcagcgaaagccggggacgctttgccaaaggatgcagatgctaacggtgcatattgtattgctctgaaaggcctttacgagatcaaacaaattactgaaaactggaaggaagatggaaagttttcccgtgataaattgaagatctctaataaggactggtttgactttatccaaaataaacgttattta

SEQ ID NO: 116 - protein, 1263 aa, synthetic construct
MNNGTNNFQNFIGISSLQKTLRNALIPTETTQQFIVKNGIIKEDELRGENRQILKDIMDDYYRGFISETLSSIDDIDWTSLFEKMEIQLKNGDNKDTLIKEQTEYRKAIHKKFANDDRFKNMFSAKLISDILPEFVIHNNNYSASEKEEKTQVIKLFSRFATSFKDYFKNRANCFSADDISSSSCHRIVNDNAEIFFSNALVYRRIVKSLSNDDINKISGDMKDSLKEMSLEEIYSYEKYGEFITQEGISFYNDICGKVNSFMNLYCQKNKENKNLYKLQKLHKQILCIADTSYEVPYKFESDEEVYQSVNGFLDNISSKHIVERLRKIGDNYNGYNLDKIYIVSKFYESVSQKTYRDWETINTALEIHYNNILPGNGKSKADKVKKAVKNDLQKSITEINELVSNYKLCSDDNIKAETYIHEISHILNNFEAQELKYNPEIHLVESELKASELKNVLDVIMNAFHWCSVFMTEELVDKDNNFYAELEEIYDEIYPVISLYNLVRNYVTQKPYSTKKIKLNFGIPTLADGWSKSKEYSNNAIILMRDNLYYLGIFNAKNKPDKKIIEGNTSENKGDYKKMIYVLLPGPNKMIPKVFLSSKTGVETYKPSAYILEGYKQNKHIKSSKDFDITFCHDLIDYFKNCIAIHPEWKNFGFDFSDTSTYEDISGFYREVELQGYKIDWTYISEKDIDLLQEKGQLYLFQIYNKDFSKKSTGNDNLHTMYLKNLFSEENLKDIVLKLNGEAEIFFRKSSIKNPIIHKKGSILVNRTYEAEEKDQFGNIQIVRKNIPENIYQELYKYFNDKSDKELSDEAAKLKNVVGHHEAATNIVKDYRYTYDKYFLHMPITINFKANKTGFINDRILQYIAKEKDLHVIGIDRGERNLIYVSVIDTCGNIVEQKSFNIVNGYDYQIKLKQQEGARQIARKEWKEIGKIKEIKEGYLSLVIHEISKMVIKYNAIIAMEDLSYGFKKGRFKVERQVYQKFETMLINKLNYLVFKDISITENGGLLKGYQLTYIPDKLKNVGHQCGCIFYVPAAYTSKIDPTTGFVNIFKFKDLTVDAKREFIKKFDSIRYDSEKNLFCFTFDYNNFITQNTVMSKSSWSVYTYGVRIKRRFVNGRFSNESDTIDITKDMEKTLEMTDINWRDGHDLRQDIIDYEIVQHIFEIFRLTVQMRNSLSELEDRDYDRLISPVLNENNIFYDSAKAGDALPKDADANGAYCIALKGLYEIKQITENWKEDGKFSRDKLKISNKDWFDFIQNKRYL

SEQ ID NO: 117 - DNA, 3789 bp, synthetic construct
  source 1..3789: mol_type = other DNA
atgaataacggtaccaataactttcaaaattttatcgggatctcctcgttgcaaaaaactcttcgtaatgctttaatcccgactgagacaacacagcagttcatcgttaaaaacggcatcattaaagaagatgagctgcgcggcgagaaccgtcagattttaaaggacatcatggacgactattaccgtgggttcatctcagaaacattaagcagcatcgatgatatcgactggacctcactgtttgagaagatggagattcaacttaagaatggagacaacaaagacactttaattaaggagcagacggaatatcgtaaagctatccataaaaaatttgcaaacgatgaccgtttcaaaaatatgttttccgcaaaattgattagcgacattttacctgaattcgtaatccataacaacaactattccgcatctgaaaaagaggagaagacccaagttatcaaacttttttcacgtttcgcgacatcttttaaagactactttaagaatcgtgcgaattgtttcagtgcagatgatatttcgtctagttcatgtcaccgtatcgtgaatgacaacgctgagattttcttttctaatgcgttggtgtatcgccgcatcgtaaagtccttgtcgaatgatgatatcaacaaaattagtggtgacatgaaagactccctgaaagaaatgtcattagaggagatttacagctacgaaaaatacggagagttcatcactcaggaaggtatctccttttacaacgatatttgcggcaaagttaatagtttcatgaatctgtattgtcagaagaataaggaaaacaagaatctgtacaagttacaaaagcttcataaacagatcttgtgcatcgccgacacgtcttatgaagtcccgtataaatttgaaagcgacgaagaagtatatcagagtgtgaatggattcttggacaatatctcatcaaaacacattgttgaacgtttgcgcaaaatcggcgacaactataacggatacaacttggataaaatttatatcgtatcaaaattttatgaatcagtatcccaaaagacttaccgtgattgggagactattaatacggcgttagaaatccattacaacaacattctgccgggtaacggtaaatcgaaagcggacaaagtgaagaaggcggttaagaacgatcttcagaagtctatcacggagattaatgagctggtttccaattacaagttgtgctcggatgataacatcaaagctgaaacctatatccatgaaatttctcatattcttaataacttcgaggcacaagaattaaaatataacccagaaattcatctggttgagagcgaacttaaagcttcagaattaaaaaatgttttggacgtaattatgaacgccttccattggtgcagcgtgtttatgacagaggagttagtagataaggataacaacttttatgcagaattggaagagatctatgatgagatctatccagtgatttcactgtataacttagtccgtaattacgtcactcagaagccgtactcaactaaaaagatcaagttaaattttggaattccgacattggcggatggttggagtaagtctaaggaatactcaaataacgctattatcttaatgcgtgacaacctgtattacttgggtattttcaatgccaaaaataagcccgataaaaaaatcattgaagggaatacttcagaaaataagggagattacaaaaaaatgatttataaccttaaaccaggcccaaacaaaatgatccccaaggtgtttttgagtagtaagacgggagtagaaacatataagccatcagcgtacattcttgaagggtacaaacaaaataaacacatcaagagcagcaaggactttgacattacattttgtcatgacttaatcgactactttaaaaattgcattgccattcaccctgagtggaaaaattttggtttcgacttcagtgatacctctacctatgaagatatctctggtttttatcgtgaggtagaacttcagggttacaagatcgattggacgtacatttccgagaaagacattgatcttttacaagagaagggtcagctttacttatttcagatctacaataaagacttttcgaaaaaatccacgggcaacgacaaccttcatacaatgtacttaaagaacctgttctctgaagaaaacttgaaagatatcgtgcttaaattgaatggcgaggccgagatttttttccgtaaaagctcgattaagaatcccatcatccacaagaaaggcagcattctggtaaatcgtacctatgaagcggaggaaaaggaccaatttggtaatattcagattgtccgtaagaacatccctgaaaatatctatcaagaattatataaatatttcaacgataagtcggacaaggaacttagcgatgaagccgcgaagttgaaaaatgttgttggtcaccacgaagcagcaacaaacattgtgaaagactatcgctacacttacgataagtactttttacatatgcctattacgattaactttaaggcaaataagacaggttttatcaacgaccgtatcctgcaatatattgcaaaagagaaggacctgcatgtcattgggattgatcgcggtgaacgcaatctgatttacgtgagtgttattgatacctgcggtaatattgttgagcaaaagtcttttaatatcgttaatggttacgactaccaaattaagcttaaacaacaggaaggtgcccgccagatcgcccgtaaggagtggaaggaaatcggaaaaattaaggaaatcaaagagggatatctgagcttggttattcatgaaatctcaaagatggttattaagtacaacgccatcatcgctatggaagacttatcgtatgggtttaaaaagggtcgtttcaaagttgagcgccaggtctaccaaaagtttgaaacgatgcttattaataaattaaactacttggttttcaaagatatctctattaccgagaatggaggtttactgaaaggataccagttaacgtatatccccgataagcttaaaaacgtgggccatcagtgtggctgtattttctatgtgcccgcggcatatacatcaaaaattgacccgacgacgggtttcgttaatatcttcaagttcaaagatctgacagttgatgcaaaacgcgaattcattaagaagttcgatagtattcgctatgactccgagaaaaatttgttttgcttcacttttgactacaataactttattactcagaatacagtcatgagtaaaagctcctggtcggtttacacgtacggggtacgcatcaaacgtcgttttgtgaatggtcgttttagtaatgagtcggatacaattgatattaccaaggatatggagaagactctggaaatgacagacatcaattggcgtgatggacatgatttgcgtcaggacattatcgactatgagattgtgcagcatattttcgaaatttttcgcctgacggtgcaaatgcgtaattccttaagcgaactggaagatcgcgactatgaccgcttaatttctcctgtgctgaatgagaacaacatcttctatgactcagcgaaagccggggacgctttgccaaaggatgcagatgctaacggtgcatattgtattgctctgaaaggcctttacgagatcaaacaaattactgaaaactggaaggaagatggaaagttttcccgtgataaattgaagatctctaataaggactggtttgactttatccaaaataaacgttattta

SEQ ID NO: 118 - protein, 1263 aa, synthetic construct
MNNGTNNFQNFIGISSLQKTLRNALIPTETTQQFIVKNGIIKEDELRGENRQILKDIMDDYYRGFISETLSSIDDIDWTSLFEKMEIQLKNGDNKDTLIKEQTEYRKAIHKKFANDDRFKNMFSAKLISDILPEFVIHNNNYSASEKEEKTQVIKLFSRFATSFKDYFKNRANCFSADDISSSSCHRIVNDNAEIFFSNALVYRRIVKSLSNDDINKISGDMKDSLKEMSLEEIYSYEKYGEFITQEGISFYNDICGKVNSFMNLYCQKNKENKNLYKLQKLHKQILCIADTSYEVPYKFESDEEVYQSVNGFLDNISSKHIVERLRKIGDNYNGYNLDKIYIVSKFYESVSQKTYRDWETINTALEIHYNNILPGNGKSKADKVKKAVKNDLQKSITEINELVSNYKLCSDDNIKAETYIHEISHILNNFEAQELKYNPEIHLVESELKASELKNVLDVIMNAFHWCSVFMTEELVDKDNNFYAELEEIYDEIYPVISLYNLVRNYVTQKPYSTKKIKLNFGIPTLADGWSKSKEYSNNAIILMRDNLYYLGIFNAKNKPDKKIIEGNTSENKGDYKKMIYNLKPGPNKMIPKVFLSSKTGVETYKPSAYILEGYKQNKHIKSSKDFDITFCHDLIDYFKNCIAIHPEWKNFGFDFSDTSTYEDISGFYREVELQGYKIDWTYISEKDIDLLQEKGQLYLFQIYNKDFSKKSTGNDNLHTMYLKNLFSEENLKDIVLKLNGEAEIFFRKSSIKNPIIHKKGSILVNRTYEAEEKDQFGNIQIVRKNIPENIYQELYKYFNDKSDKELSDEAAKLKNVVGHHEAATNIVKDYRYTYDKYFLHMPITINFKANKTGFINDRILQYIAKEKDLHVIGIDRGERNLIYVSVIDTCGNIVEQKSFNIVNGYDYQIKLKQQEGARQIARKEWKEIGKIKEIKEGYLSLVIHEISKMVIKYNAIIAMEDLSYGFKKGRFKVERQVYQKFETMLINKLNYLVFKDISITENGGLLKGYQLTYIPDKLKNVGHQCGCIFYVPAAYTSKIDPTTGFVNIFKFKDLTVDAKREFIKKFDSIRYDSEKNLFCFTFDYNNFITQNTVMSKSSWSVYTYGVRIKRRFVNGRFSNESDTIDITKDMEKTLEMTDINWRDGHDLRQDIIDYEIVQHIFEIFRLTVQMRNSLSELEDRDYDRLISPVLNENNIFYDSAKAGDALPKDADANGAYCIALKGLYEIKQITENWKEDGKFSRDKLKISNKDWFDFIQNKRYL

SEQ ID NO: 119 - DNA, 3789 bp, synthetic construct
  source 1..3789: mol_type = other DNA
atgaataacggtaccaataactttcaaaattttatcgggatctcctcgttgcaaaaaactcttcgtaatgctttaatcccgactgagacaacacagcagttcatcgttaaaaacggcatcattaaagaagatgagctgcgcggcgagaaccgtcagattttaaaggacatcatggacgactattaccgtgggttcatctcagaaacattaagcagcatcgatgatatcgactggacctcactgtttgagaagatggagattcaacttaagaatggagacaacaaagacactttaattaaggagcagacggaatatcgtaaagctatccataaaaaatttgcaaacgatgaccgtttcaaaaatatgttttccgcaaaattgattagcgacattttacctgaattcgtaatccataacaacaactattccgcatctgaaaaagaggagaagacccaagttatcaaacttttttcacgtttcgcgacatcttttaaagactactttaagaatcgtgcgaattgtttcagtgcagatgatatttcgtctagttcatgtcaccgtatcgtgaatgacaacgctgagattttcttttctaatgcgttggtgtatcgccgcatcgtaaagtccttgtcgaatgatgatatcaacaaaattagtggtgacatgaaagactccctgaaagaaatgtcattagaggagatttacagctacgaaaaatacggagagttcatcactcaggaaggtatctccttttacaacgatatttgcggcaaagttaatagtttcatgaatctgtattgtcagaagaataaggaaaacaagaatctgtacaagttacaaaagcttcataaacagatcttgtgcatcgccgacacgtcttatgaagtcccgtataaatttgaaagcgacgaagaagtatatcagagtgtgaatggattcttggacaatatctcatcaaaacacattgttgaacgtttgcgcaaaatcggcgacaactataacggatacaacttggataaaatttatatcgtatcaaaattttatgaatcagtatcccaaaagacttaccgtgattgggagactattaatacggcgttagaaatccattacaacaacattctgccgggtaacggtaaatcgaaagcggacaaagtgaagaaggcggttaagaacgatcttcagaagtctatcacggagattaatgagctggtttccaattacaagttgtgctcggatgataacatcaaagctgaaacctatatccatgaaatttctcatattcttaataacttcgaggcacaagaattaaaatataacccagaaattcatctggttgagagcgaacttaaagcttcagaattaaaaaatgttttggacgtaattatgaacgccttccattggtgcagcgtgtttatgacagaggagttagtagataaggataacaacttttatgcagaattggaagagatctatgatgagatctatccagtgatttcactgtataacttagtccgtaattacgtcactcagaagccgtactcaactaaaaagatcaagttaaattttggaattccgacattggcggatggttggagtaagtctaaggaatactcaaataacgctattatcttaatgcgtgacaacctgtattacttgggtattttcaatgccaaaaataagcccgataaaaaaatcattgaagggaatacttcagaaaataagggagattacaaaaaaatgatttataaccttttgccaggcccaaacaaaatgatccccaaggtgtttttgagtagtaagacgggagtagaaacatataagccatcagcgtacattcttgaagggtacaaacaaaataaacacatcaagagcagcaaggactttgacattacattttgtcatgacttaatcgactactttaaaaattgcattgccattcaccctgagtggaaaaatcgtggtttcgacttcagtgatacctctacctatgaagatatctctggtttttatcgtgaggtagaacttcagggttacaagatcgattggacgtacatttccgagaaagacattgatcttttacaagagaagggtcagctttacttatttcagatctacaataaagacttttcgaaaaaatccacgggcaacgacaaccttcatacaatgtacttaaagaacctgttctctgaagaaaacttgaaagatatcgtgcttaaattgaatggcgaggccgagatttttttccgtaaaagctcgattaagaatcccatcatccacaagaaaggcagcattctggtaaatcgtacctatgaagcggaggaaaaggaccaatttggtaatattcagattgtccgtaagaacatccctgaaaatatctatcaagaattatataaatatttcaacgataagtcggacaaggaacttagcgatgaagccgcgaagttgaaaaatgttgttggtcaccacgaagcagcaacaaacattgtgaaagactatcgctacacttacgataagtactttttacatatgcctattacgattaactttaaggcaaataagacaggttttatcaacgaccgtatcctgcaatatattgcaaaagagaaggacctgcatgtcattgggattgatcgcggtgaacgcaatctgatttacgtgagtgttattgatacctgcggtaatattgttgagcaaaagtcttttaatatcgttaatggttacgactaccaaattaagcttaaacaacaggaaggtgcccgccagatcgcccgtaaggagtggaaggaaatcggaaaaattaaggaaatcaaagagggatatctgagcttggttattcatgaaatctcaaagatggttattaagtacaacgccatcatcgctatggaagacttatcgtatgggtttaaaaagggtcgtttcaaagttgagcgccaggtctaccaaaagtttgaaacgatgcttattaataaattaaactacttggttttcaaagatatctctattaccgagaatggaggtttactgaaaggataccagttaacgtatatccccgataagcttaaaaacgtgggccatcagtgtggctgtattttctatgtgcccgcggcatatacatcaaaaattgacccgacgacgggtttcgttaatatcttcaagttcaaagatctgacagttgatgcaaaacgcgaattcattaagaagttcgatagtattcgctatgactccgagaaaaatttgttttgcttcacttttgactacaataactttattactcagaatacagtcatgagtaaaagctcctggtcggtttacacgtacggggtacgcatcaaacgtcgttttgtgaatggtcgttttagtaatgagtcggatacaattgatattaccaaggatatggagaagactctggaaatgacagacatcaattggcgtgatggacatgatttgcgtcaggacattatcgactatgagattgtgcagcatattttcgaaatttttcgcctgacggtgcaaatgcgtaattccttaagcgaactggaagatcgcgactatgaccgcttaatttctcctgtgctgaatgagaacaacatcttctatgactcagcgaaagccggggacgctttgccaaaggatgcagatgctaacggtgcatattgtattgctctgaaaggcctttacgagatcaaacaaattactgaaaactggaaggaagatggaaagttttcccgtgataaattgaagatctctaataaggactggtttgactttatccaaaataaacgttattta

SEQ ID NO: 120 - protein, 1263 aa, synthetic construct
MNNGTNNFQNFIGISSLQKTLRNALIPTETTQQFIVKNGIIKEDELRGENRQILKDIMDDYYRGFISETLSSIDDIDWTSLFEKMEIQLKNGDNKDTLIKEQTEYRKAIHKKFANDDRFKNMFSAKLISDILPEFVIHNNNYSASEKEEKTQVIKLFSRFATSFKDYFKNRANCFSADDISSSSCHRIVNDNAEIFFSNALVYRRIVKSLSNDDINKISGDMKDSLKEMSLEEIYSYEKYGEFITQEGISFYNDICGKVNSFMNLYCQKNKENKNLYKLQKLHKQILCIADTSYEVPYKFESDEEVYQSVNGFLDNISSKHIVERLRKIGDNYNGYNLDKIYIVSKFYESVSQKTYRDWETINTALEIHYNNILPGNGKSKADKVKKAVKNDLQKSITEINELVSNYKLCSDDNIKAETYIHEISHILNNFEAQELKYNPEIHLVESELKASELKNVLDVIMNAFHWCSVFMTEELVDKDNNFYAELEEIYDEIYPVISLYNLVRNYVTQKPYSTKKIKLNFGIPTLADGWSKSKEYSNNAIILMRDNLYYLGIFNAKNKPDKKIIEGNTSENKGDYKKMIYNLLPGPNKMIPKVFLSSKTGVETYKPSAYILEGYKQNKHIKSSKDFDITFCHDLIDYFKNCIAIHPEWKNRGFDFSDTSTYEDISGFYREVELQGYKIDWTYISEKDIDLLQEKGQLYLFQIYNKDFSKKSTGNDNLHTMYLKNLFSEENLKDIVLKLNGEAEIFFRKSSIKNPIIHKKGSILVNRTYEAEEKDQFGNIQIVRKNIPENIYQELYKYFNDKSDKELSDEAAKLKNVVGHHEAATNIVKDYRYTYDKYFLHMPITINFKANKTGFINDRILQYIAKEKDLHVIGIDRGERNLIYVSVIDTCGNIVEQKSFNIVNGYDYQIKLKQQEGARQIARKEWKEIGKIKEIKEGYLSLVIHEISKMVIKYNAIIAMEDLSYGFKKGRFKVERQVYQKFETMLINKLNYLVFKDISITENGGLLKGYQLTYIPDKLKNVGHQCGCIFYVPAAYTSKIDPTTGFVNIFKFKDLTVDAKREFIKKFDSIRYDSEKNLFCFTFDYNNFITQNTVMSKSSWSVYTYGVRIKRRFVNGRFSNESDTIDITKDMEKTLEMTDINWRDGHDLRQDIIDYEIVQHIFEIFRLTVQMRNSLSELEDRDYDRLISPVLNENNIFYDSAKAGDALPKDADANGAYCIALKGLYEIKQITENWKEDGKFSRDKLKISNKDWFDFIQNKRYL

SEQ ID NO: 121 - DNA, 3789 bp, synthetic construct
  source 1..3789: mol_type = other DNA
atgaataacggtaccaataactttcaaaattttatcgggatctcctcgttgcaaaaaactcttcgtaatgctttaatcccgactgagacaacacagcagttcatcgttaaaaacggcatcattaaagaagatgagctgcgcggcgagaaccgtcagattttaaaggacatcatggacgactattaccgtgggttcatctcagaaacattaagcagcatcgatgatatcgactggacctcactgtttgagaagatggagattcaacttaagaatggagacaacaaagacactttaattaaggagcagacggaatatcgtaaagctatccataaaaaatttgcaaacgatgaccgtttcaaaaatatgttttccgcaaaattgattagcgacattttacctgaattcgtaatccataacaacaactattccgcatctgaaaaagaggagaagacccaagttatcaaacttttttcacgtttcgcgacatcttttaaagactactttaagaatcgtgcgaattgtttcagtgcagatgatatttcgtctagttcatgtcaccgtatcgtgaatgacaacgctgagattttcttttctaatgcgttggtgtatcgccgcatcgtaaagtccttgtcgaatgatgatatcaacaaaattagtggtgacatgaaagactccctgaaagaaatgtcattagaggagatttacagctacgaaaaatacggagagttcatcactcaggaaggtatctccttttacaacgatatttgcggcaaagttaatagtttcatgaatctgtattgtcagaagaataaggaaaacaagaatctgtacaagttacaaaagcttcataaacagatcttgtgcatcgccgacacgtcttatgaagtcccgtataaatttgaaagcgacgaagaagtatatcagagtgtgaatggattcttggacaatatctcatcaaaacacattgttgaacgtttgcgcaaaatcggcgacaactataacggatacaacttggataaaatttatatcgtatcaaaattttatgaatcagtatcccaaaagacttaccgtgattgggagactattaatacggcgttagaaatccattacaacaacattctgccgggtaacggtaaatcgaaagcggacaaagtgaagaaggcggttaagaacgatcttcagaagtctatcacggagattaatgagctggtttccaattacaagttgtgctcggatgataacatcaaagctgaaacctatatccatgaaatttctcatattcttaataacttcgaggcacaagaattaaaatataacccagaaattcatctggttgagagcgaacttaaagcttcagaattaaaaaatgttttggacgtaattatgaacgccttccattggtgcagcgtgtttatgacagaggagttagtagataaggataacaacttttatgcagaattggaagagatctatgatgagatctatccagtgatttcactgtataacttagtccgtaattacgtcactcagaagccgtactcaactaaaaagatcaagttaaattttggaattccgacattggcggatggttggagtaagtctaaggaatactcaaataacgctattatcttaatgcgtgacaacctgtattacttgggtattttcaatgccaaaaataagcccgataaaaaaatcattgaagggaatacttcagaaaataagggagattacaaaaaaatgatttataaccttttgccaggcccaaacaaaatgatccccaaggtgtttttgagtagtaagacgggagtagaaacatataagccatcagcgtacattcttgaagggtacaaacaaaataaacacatcaagagcagcaaggactttgacattacattttgtcatgacttaatcgactactttaaaaattgcattgccattcaccctgagtggaaaaattttggtttcgacttcagtgatacctctacctatgaagatatctctggtttttatcgtgaggtagaacttcagggttacaagatcgattggacgtacatttccgagaaagacattgatcttttacaagagaagggtcagctttacttatttcagatctacaataaagacttttcgaaacgttccacgggcaacgacaaccttcatacaatgtacttaaagaacctgttctctgaagaaaacttgaaagatatcgtgcttaaattgaatggcgaggccgagatttttttccgtaaaagctcgattaagaatcccatcatccacaagaaaggcagcattctggtaaatcgtacctatgaagcggaggaaaaggaccaatttggtaatattcagattgtccgtaagaacatccctgaaaatatctatcaagaattatataaatatttcaacgataagtcggacaaggaacttagcgatgaagccgcgaagttgaaaaatgttgttggtcaccacgaagcagcaacaaacattgtgaaagactatcgctacacttacgataagtactttttacatatgcctattacgattaactttaaggcaaataagacaggttttatcaacgaccgtatcctgcaatatattgcaaaagagaaggacctgcatgtcattgggattgatcgcggtgaacgcaatctgatttacgtgagtgttattgatacctgcggtaatattgttgagcaaaagtcttttaatatcgttaatggttacgactaccaaattaagcttaaacaacaggaaggtgcccgccagatcgcccgtaaggagtggaaggaaatcggaaaaattaaggaaatcaaagagggatatctgagcttggttattcatgaaatctcaaagatggttattaagtacaacgccatcatcgctatggaagacttatcgtatgggtttaaaaagggtcgtttcaaagttgagcgccaggtctaccaaaagtttgaaacgatgcttattaataaattaaactacttggttttcaaagatatctctattaccgagaatggaggtttactgaaaggataccagttaacgtatatccccgataagcttaaaaacgtgggccatcagtgtggctgtattttctatgtgcccgcggcatatacatcaaaaattgacccgacgacgggtttcgttaatatcttcaagttcaaagatctgacagttgatgcaaaacgcgaattcattaagaagttcgatagtattcgctatgactccgagaaaaatttgttttgcttcacttttgactacaataactttattactcagaatacagtcatgagtaaaagctcctggtcggtttacacgtacggggtacgcatcaaacgtcgttttgtgaatggtcgttttagtaatgagtcggatacaattgatattaccaaggatatggagaagactctggaaatgacagacatcaattggcgtgatggacatgatttgcgtcaggacattatcgactatgagattgtgcagcatattttcgaaatttttcgcctgacggtgcaaatgcgtaattccttaagcgaactggaagatcgcgactatgaccgcttaatttctcctgtgctgaatgagaacaacatcttctatgactcagcgaaagccggggacgctttgccaaaggatgcagatgctaacggtgcatattgtattgctctgaaaggcctttacgagatcaaacaaattactgaaaactggaaggaagatggaaagttttcccgtgataaattgaagatctctaataaggactggtttgactttatccaaaataaacgttattta

SEQ ID NO: 122 - protein, 1263 aa, synthetic construct
MNNGTNNFQNFIGISSLQKTLRNALIPTETTQQFIVKNGIIKEDELRGENRQILKDIMDDYYRGFISETLSSIDDIDWTSLFEKMEIQLKNGDNKDTLIKEQTEYRKAIHKKFANDDRFKNMFSAKLISDILPEFVIHNNNYSASEKEEKTQVIKLFSRFATSFKDYFKNRANCFSADDISSSSCHRIVNDNAEIFFSNALVYRRIVKSLSNDDINKISGDMKDSLKEMSLEEIYSYEKYGEFITQEGISFYNDICGKVNSFMNLYCQKNKENKNLYKLQKLHKQILCIADTSYEVPYKFESDEEVYQSVNGFLDNISSKHIVERLRKIGDNYNGYNLDKIYIVSKFYESVSQKTYRDWETINTALEIHYNNILPGNGKSKADKVKKAVKNDLQKSITEINELVSNYKLCSDDNIKAETYIHEISHILNNFEAQELKYNPEIHLVESELKASELKNVLDVIMNAFHWCSVFMTEELVDKDNNFYAELEEIYDEIYPVISLYNLVRNYVTQKPYSTKKIKLNFGIPTLADGWSKSKEYSNNAIILMRDNLYYLGIFNAKNKPDKKIIEGNTSENKGDYKKMIYNLLPGPNKMIPKVFLSSKTGVETYKPSAYILEGYKQNKHIKSSKDFDITFCHDLIDYFKNCIAIHPEWKNFGFDFSDTSTYEDISGFYREVELQGYKIDWTYISEKDIDLLQEKGQLYLFQIYNKDFSKRSTGNDNLHTMYLKNLFSEENLKDIVLKLNGEAEIFFRKSSIKNPIIHKKGSILVNRTYEAEEKDQFGNIQIVRKNIPENIYQELYKYFNDKSDKELSDEAAKLKNVVGHHEAATNIVKDYRYTYDKYFLHMPITINFKANKTGFINDRILQYIAKEKDLHVIGIDRGERNLIYVSVIDTCGNIVEQKSFNIVNGYDYQIKLKQQEGARQIARKEWKEIGKIKEIKEGYLSLVIHEISKMVIKYNAIIAMEDLSYGFKKGRFKVERQVYQKFETMLINKLNYLVFKDISITENGGLLKGYQLTYIPDKLKNVGHQCGCIFYVPAAYTSKIDPTTGFVNIFKFKDLTVDAKREFIKKFDSIRYDSEKNLFCFTFDYNNFITQNTVMSKSSWSVYTYGVRIKRRFVNGRFSNESDTIDITKDMEKTLEMTDINWRDGHDLRQDIIDYEIVQHIFEIFRLTVQMRNSLSELEDRDYDRLISPVLNENNIFYDSAKAGDALPKDADANGAYCIALKGLYEIKQITENWKEDGKFSRDKLKISNKDWFDFIQNKRYL

SEQ ID NO: 123 - DNA, 3789 bp, synthetic construct
  source 1..3789: mol_type = other DNA
atgaataacggtaccaataactttcaaaattttatcgggatctcctcgttgcaaaaaactcttcgtaatgctttaatcccgactgagacaacacagcagttcatcgttaaaaacggcatcattaaagaagatgagctgcgcggcgagaaccgtcagattttaaaggacatcatggacgactattaccgtgggttcatctcagaaacattaagcagcatcgatgatatcgactggacctcactgtttgagaagatggagattcaacttaagaatggagacaacaaagacactttaattaaggagcagacggaatatcgtaaagctatccataaaaaatttgcaaacgatgaccgtttcaaaaatatgttttccgcaaaattgattagcgacattttacctgaattcgtaatccataacaacaactattccgcatctgaaaaagaggagaagacccaagttatcaaacttttttcacgtttcgcgacatcttttaaagactactttaagaatcgtgcgaattgtttcagtgcagatgatatttcgtctagttcatgtcaccgtatcgtgaatgacaacgctgagattttcttttctaatgcgttggtgtatcgccgcatcgtaaagtccttgtcgaatgatgatatcaacaaaattagtggtgacatgaaagactccctgaaagaaatgtcattagaggagatttacagctacgaaaaatacggagagttcatcactcaggaaggtatctccttttacaacgatatttgcggcaaagttaatagtttcatgaatctgtattgtcagaagaataaggaaaacaagaatctgtacaagttacaaaagcttcataaacagatcttgtgcatcgccgacacgtcttatgaagtcccgtataaatttgaaagcgacgaagaagtatatcagagtgtgaatggattcttggacaatatctcatcaaaacacattgttgaacgtttgcgcaaaatcggcgacaactataacggatacaacttggataaaatttatatcgtatcaaaattttatgaatcagtatcccaaaagacttaccgtgattgggagactattaatacggcgttagaaatccattacaacaacattctgccgggtaacggtaaatcgaaagcggacaaagtgaagaaggcggttaagaacgatcttcagaagtctatcacggagattaatgagctggtttccaattacaagttgtgctcggatgataacatcaaagctgaaacctatatccatgaaatttctcatattcttaataacttcgaggcacaagaattaaaatataacccagaaattcatctggttgagagcgaacttaaagcttcagaattaaaaaatgttttggacgtaattatgaacgccttccattggtgcagcgtgtttatgacagaggagttagtagataaggataacaacttttatgcagaattggaagagatctatgatgagatctatccagtgatttcactgtataacttagtccgtaattacgtcactcagaagccgtactcaactaaaaagatcaagttaaattttggaattccgacattggcggatggttggagtaagtctaaggaatactcaaataacgctattatcttaatgcgtgacaacctgtattacttgggtattttcaatgccaaaaataagcccgataaaaaaatcattgaagggaatacttcagaaaataagggagattacaaaaaaatgatttataaccttttgccaggcccaaacaaaatgatccccaaggtgtttttgagtagtaagacgggagtagaaacatataagccatcagcgtacattcttgaagggtacaaacaaaataaacacatcaagagcagcaaggactttgacattacattttgtcatgacttaatcgactactttaaaaattgcattgccattcaccctgagtggaaaaattttggtttcgacttcagtgatacctctacctatgaagatatctctggtttttatcgtgaggtagaacttcagggttacaagatcgattggacgtacatttccgagaaagacattgatcttttacaagagaagggtcagctttacttatttcagatctacaataaagacttttcgaaaaaatccacgggccgtgacaaccttcatacaatgtacttaaagaacctgttctctgaagaaaacttgaaagatatcgtgcttaaattgaatggcgaggccgagatttttttccgtaaaagctcgattaagaatcccatcatccacaagaaaggcagcattctggtaaatcgtacctatgaagcggaggaaaaggaccaatttggtaatattcagattgtccgtaagaacatccctgaaaatatctatcaagaattatataaatatttcaacgataagtcggacaaggaacttagcgatgaagccgcgaagttgaaaaatgttgttggtcaccacgaagcagcaacaaacattgtgaaagactatcgctacacttacgataagtactttttacatatgcctattacgattaactttaaggcaaataagacaggttttatcaacgaccgtatcctgcaatatattgcaaaagagaaggacctgcatgtcattgggattgatcgcggtgaacgcaatctgatttacgtgagtgttattgatacctgcggtaatattgttgagcaaaagtcttttaatatcgttaatggttacgactaccaaattaagcttaaacaacaggaaggtgcccgccagatcgcccgtaaggagtggaaggaaatcggaaaaattaaggaaatcaaagagggatatctgagcttggttattcatgaaatctcaaagatggttattaagtacaacgccatcatcgctatggaagacttatcgtatgggtttaaaaagggtcgtttcaaagttgagcgccaggtctaccaaaagtttgaaacgatgcttattaataaattaaactacttggttttcaaagatatctctattaccgagaatggaggtttactgaaaggataccagttaacgtatatccccgataagcttaaaaacgtgggccatcagtgtggctgtattttctatgtgcccgcggcatatacatcaaaaattgacccgacgacgggtttcgttaatatcttcaagttcaaagatctgacagttgatgcaaaacgcgaattcattaagaagttcgatagtattcgctatgactccgagaaaaatttgttttgcttcacttttgactacaataactttattactcagaatacagtcatgagtaaaagctcctggtcggtttacacgtacggggtacgcatcaaacgtcgttttgtgaatggtcgttttagtaatgagtcggatacaattgatattaccaaggatatggagaagactctggaaatgacagacatcaattggcgtgatggacatgatttgcgtcaggacattatcgactatgagattgtgcagcatattttcgaaatttttcgcctgacggtgcaaatgcgtaattccttaagcgaactggaagatcgcgactatgaccgcttaatttctcctgtgctgaatgagaacaacatcttctatgactcagcgaaagccggggacgctttgccaaaggatgcagatgctaacggtgcatattgtattgctctgaaaggcctttacgagatcaaacaaattactgaaaactggaaggaagatggaaagttttcccgtgataaattgaagatctctaataaggactggtttgactttatccaaaataaacgttattta

SEQ ID NO: 124 - protein, 1263 aa, synthetic construct
MNNGTNNFQNFIGISSLQKTLRNALIPTETTQQFIVKNGIIKEDELRGENRQILKDIMDDYYRGFISETLSSIDDIDWTSLFEKMEIQLKNGDNKDTLIKEQTEYRKAIHKKFANDDRFKNMFSAKLISDILPEFVIHNNNYSASEKEEKTQVIKLFSRFATSFKDYFKNRANCFSADDISSSSCHRIVNDNAEIFFSNALVYRRIVKSLSNDDINKISGDMKDSLKEMSLEEIYSYEKYGEFITQEGISFYNDICGKVNSFMNLYCQKNKENKNLYKLQKLHKQILCIADTSYEVPYKFESDEEVYQSVNGFLDNISSKHIVERLRKIGDNYNGYNLDKIYIVSKFYESVSQKTYRDWETINTALEIHYNNILPGNGKSKADKVKKAVKNDLQKSITEINELVSNYKLCSDDNIKAETYIHEISHILNNFEAQELKYNPEIHLVESELKASELKNVLDVIMNAFHWCSVFMTEELVDKDNNFYAELEEIYDEIYPVISLYNLVRNYVTQKPYSTKKIKLNFGIPTLADGWSKSKEYSNNAIILMRDNLYYLGIFNAKNKPDKKIIEGNTSENKGDYKKMIYNLLPGPNKMIPKVFLSSKTGVETYKPSAYILEGYKQNKHIKSSKDFDITFCHDLIDYFKNCIAIHPEWKNFGFDFSDTSTYEDISGFYREVELQGYKIDWTYISEKDIDLLQEKGQLYLFQIYNKDFSKKSTGRDNLHTMYLKNLFSEENLKDIVLKLNGEAEIFFRKSSIKNPIIHKKGSILVNRTYEAEEKDQFGNIQIVRKNIPENIYQELYKYFNDKSDKELSDEAAKLKNVVGHHEAATNIVKDYRYTYDKYFLHMPITINFKANKTGFINDRILQYIAKEKDLHVIGIDRGERNLIYVSVIDTCGNIVEQKSFNIVNGYDYQIKLKQQEGARQIARKEWKEIGKIKEIKEGYLSLVIHEISKMVIKYNAIIAMEDLSYGFKKGRFKVERQVYQKFETMLINKLNYLVFKDISITENGGLLKGYQLTYIPDKLKNVGHQCGCIFYVPAAYTSKIDPTTGFVNIFKFKDLTVDAKREFIKKFDSIRYDSEKNLFCFTFDYNNFITQNTVMSKSSWSVYTYGVRIKRRFVNGRFSNESDTIDITKDMEKTLEMTDINWRDGHDLRQDIIDYEIVQHIFEIFRLTVQMRNSLSELEDRDYDRLISPVLNENNIFYDSAKAGDALPKDADANGAYCIALKGLYEIKQITENWKEDGKFSRDKLKISNKDWFDFIQNKRYL

SEQ ID NO: 125 - DNA, 3789 bp, synthetic construct
  source 1..3789: mol_type = other DNA
atgaataacggtaccaataactttcaaaattttatcgggatctcctcgttgcaaaaaactcttcgtaatgctttaatcccgactgagacaacacagcagttcatcgttaaaaacggcatcattaaagaagatgagctgcgcggcgagaaccgtcagattttaaaggacatcatggacgactattaccgtgggttcatctcagaaacattaagcagcatcgatgatatcgactggacctcactgtttgagaagatggagattcaacttaagaatggagacaacaaagacactttaattaaggagcagacggaatatcgtaaagctatccataaaaaatttgcaaacgatgaccgtttcaaaaatatgttttccgcaaaattgattagcgacattttacctgaattcgtaatccataacaacaactattccgcatctgaaaaagaggagaagacccaagttatcaaacttttttcacgtttcgcgacatcttttaaagactactttaagaatcgtgcgaattgtttcagtgcagatgatatttcgtctagttcatgtcaccgtatcgtgaatgacaacgctgagattttcttttctaatgcgttggtgtatcgccgcatcgtaaagtccttgtcgaatgatgatatcaacaaaattagtggtgacatgaaagactccctgaaagaaatgtcattagaggagatttacagctacgaaaaatacggagagttcatcactcaggaaggtatctccttttacaacgatatttgcggcaaagttaatagtttcatgaatctgtattgtcagaagaataaggaaaacaagaatctgtacaagttacaaaagcttcataaacagatcttgtgcatcgccgacacgtcttatgaagtcccgtataaatttgaaagcgacgaagaagtatatcagagtgtgaatggattcttggacaatatctcatcaaaacacattgttgaacgtttgcgcaaaatcggcgacaactataacggatacaacttggataaaatttatatcgtatcaaaattttatgaatcagtatcccaaaagacttaccgtgattgggagactattaatacggcgttagaaatccattacaacaacattctgccgggtaacggtaaatcgaaagcggacaaagtgaagaaggcggttaagaacgatcttcagaagtctatcacggagattaatgagctggtttccaattacaagttgtgctcggatgataacatcaaagctgaaacctatatccatgaaatttctcatattcttaataacttcgaggcacaagaattaaaatataacccagaaattcatctggttgagagcgaacttaaagcttcagaattaaaaaatgttttggacgtaattatgaacgccttccattggtgcagcgtgtttatgacagaggagttagtagataaggataacaacttttatgcagaattggaagagatctatgatgagatctatccagtgatttcactgtataacttagtccgtaattacgtcactcagaagccgtactcaactaaaaagatcaagttaaattttggaattccgacattggcggatggttggagtaagtctaaggaatactcaaataacgctattatcttaatgcgtgacaacctgtattacttgggtattttcaatgccaaaaataagcccgataaaaaaatcattgaagggaatacttcagaaaataagggagattacaaaaaaatgatttataaccttttgccaggcccaaacaaaatgatccccaaggtgtttttgagtagtaagacgggagtagaaacatataagccatcagcgtacattcttgaagggtacaaacaaaataaacacatcaagagcagcaaggactttgacattacattttgtcatgacttaatcgactactttaaaaattgcattgccattcaccctgagtggaaaaattttggtttcgacttcagtgatacctctacctatgaagatatctctggtttttatcgtgaggtagaacttcagggttacaagatcgattggacgtacatttccgagaaagacattgatcttttacaagagaagggtcagctttacttatttcagatctacaataaagacttttcgaaaaaatccacgggcaacgacaaccttcatacaatgtacttaaagaacctgttctctgaaccgaacttgaaagatatcgtgcttaaattgaatggcgaggccgagatttttttccgtaaaagctcgattaagaatcccatcatccacaagaaaggcagcattctggtaaatcgtacctatgaagcggaggaaaaggaccaatttggtaatattcagattgtccgtaagaacatccctgaaaatatctatcaagaattatataaatatttcaacgataagtcggacaaggaacttagcgatgaagccgcgaagttgaaaaatgttgttggtcaccacgaagcagcaacaaacattgtgaaagactatcgctacacttacgataagtactttttacatatgcctattacgattaactttaaggcaaataagacaggttttatcaacgaccgtatcctgcaatatattgcaaaagagaaggacctgcatgtcattgggattgatcgcggtgaacgcaatctgatttacgtgagtgttattgatacctgcggtaatattgttgagcaaaagtcttttaatatcgttaatggttacgactaccaaattaagcttaaacaacaggaaggtgcccgccagatcgcccgtaaggagtggaaggaaatcggaaaaattaaggaaatcaaagagggatatctgagcttggttattcatgaaatctcaaagatggttattaagtacaacgccatcatcgctatggaagacttatcgtatgggtttaaaaagggtcgtttcaaagttgagcgccaggtctaccaaaagtttgaaacgatgcttattaataaattaaactacttggttttcaaagatatctctattaccgagaatggaggtttactgaaaggataccagttaacgtatatccccgataagcttaaaaacgtgggccatcagtgtggctgtattttctatgtgcccgcggcatatacatcaaaaattgacccgacgacgggtttcgttaatatcttcaagttcaaagatctgacagttgatgcaaaacgcgaattcattaagaagttcgatagtattcgctatgactccgagaaaaatttgttttgcttcacttttgactacaataactttattactcagaatacagtcatgagtaaaagctcctggtcggtttacacgtacggggtacgcatcaaacgtcgttttgtgaatggtcgttttagtaatgagtcggatacaattgatattaccaaggatatggagaagactctggaaatgacagacatcaattggcgtgatggacatgatttgcgtcaggacattatcgactatgagattgtgcagcatattttcgaaatttttcgcctgacggtgcaaatgcgtaattccttaagcgaactggaagatcgcgactatgaccgcttaatttctcctgtgctgaatgagaacaacatcttctatgactcagcgaaagccggggacgctttgccaaaggatgcagatgctaacggtgcatattgtattgctctgaaaggcctttacgagatcaaacaaattactgaaaactggaaggaagatggaaagttttcccgtgataaattgaagatctctaataaggactggtttgactttatccaaaataaacgttattta

SEQ ID NO: 126 - protein, 1263 aa, synthetic construct
MNNGTNNFQNFIGISSLQKTLRNALIPTETTQQFIVKNGIIKEDELRGENRQILKDIMDDYYRGFISETLSSIDDIDWTSLFEKMEIQLKNGDNKDTLIKEQTEYRKAIHKKFANDDRFKNMFSAKLISDILPEFVIHNNNYSASEKEEKTQVIKLFSRFATSFKDYFKNRANCFSADDISSSSCHRIVNDNAEIFFSNALVYRRIVKSLSNDDINKISGDMKDSLKEMSLEEIYSYEKYGEFITQEGISFYNDICGKVNSFMNLYCQKNKENKNLYKLQKLHKQILCIADTSYEVPYKFESDEEVYQSVNGFLDNISSKHIVERLRKIGDNYNGYNLDKIYIVSKFYESVSQKTYRDWETINTALEIHYNNILPGNGKSKADKVKKAVKNDLQKSITEINELVSNYKLCSDDNIKAETYIHEISHILNNFEAQELKYNPEIHLVESELKASELKNVLDVIMNAFHWCSVFMTEELVDKDNNFYAELEEIYDEIYPVISLYNLVRNYVTQKPYSTKKIKLNFGIPTLADGWSKSKEYSNNAIILMRDNLYYLGIFNAKNKPDKKIIEGNTSENKGDYKKMIYNLLPGPNKMIPKVFLSSKTGVETYKPSAYILEGYKQNKHIKSSKDFDITFCHDLIDYFKNCIAIHPEWKNFGFDFSDTSTYEDISGFYREVELQGYKIDWTYISEKDIDLLQEKGQLYLFQIYNKDFSKKSTGNDNLHTMYLKNLFSEPNLKDIVLKLNGEAEIFFRKSSIKNPIIHKKGSILVNRTYEAEEKDQFGNIQIVRKNIPENIYQELYKYFNDKSDKELSDEAAKLKNVVGHHEAATNIVKDYRYTYDKYFLHMPITINFKANKTGFINDRILQYIAKEKDLHVIGIDRGERNLIYVSVIDTCGNIVEQKSFNIVNGYDYQIKLKQQEGARQIARKEWKEIGKIKEIKEGYLSLVIHEISKMVIKYNAIIAMEDLSYGFKKGRFKVERQVYQKFETMLINKLNYLVFKDISITENGGLLKGYQLTYIPDKLKNVGHQCGCIFYVPAAYTSKIDPTTGFVNIFKFKDLTVDAKREFIKKFDSIRYDSEKNLFCFTFDYNNFITQNTVMSKSSWSVYTYGVRIKRRFVNGRFSNESDTIDITKDMEKTLEMTDINWRDGHDLRQDIIDYEIVQHIFEIFRLTVQMRNSLSELEDRDYDRLISPVLNENNIFYDSAKAGDALPKDADANGAYCIALKGLYEIKQITENWKEDGKFSRDKLKISNKDWFDFIQNKRYL

SEQ ID NO: 127 - DNA, 3789 bp, synthetic construct
  source 1..3789: mol_type = other DNA
atgaataacggtaccaataactttcaaaattttatcgggatctcctcgttgcaaaaaactcttcgtaatgctttaatcccgactgagacaacacagcagttcatcgttaaaaacggcatcattaaagaagatgagctgcgcggcgagaaccgtcagattttaaaggacatcatggacgactattaccgtgggttcatctcagaaacattaagcagcatcgatgatatcgactggacctcactgtttgagaagatggagattcaacttaagaatggagacaacaaagacactttaattaaggagcagacggaatatcgtaaagctatccataaaaaatttgcaaacgatgaccgtttcaaaaatatgttttccgcaaaattgattagcgacattttacctgaattcgtaatccataacaacaactattccgcatctgaaaaagaggagaagacccaagttatcaaacttttttcacgtttcgcgacatcttttaaagactactttaagaatcgtgcgaattgtttcagtgcagatgatatttcgtctagttcatgtcaccgtatcgtgaatgacaacgctgagattttcttttctaatgcgttggtgtatcgccgcatcgtaaagtccttgtcgaatgatgatatcaacaaaattagtggtgacatgaaagactccctgaaagaaatgtcattagaggagatttacagctacgaaaaatacggagagttcatcactcaggaaggtatctccttttacaacgatatttgcggcaaagttaatagtttcatgaatctgtattgtcagaagaataaggaaaacaagaatctgtacaagttacaaaagcttcataaacagatcttgtgcatcgccgacacgtcttatgaagtcccgtataaatttgaaagcgacgaagaagtatatcagagtgtgaatggattcttggacaatatctcatcaaaacacattgttgaacgtttgcgcaaaatcggcgacaactataacggatacaacttggataaaatttatatcgtatcaaaattttatgaatcagtatcccaaaagacttaccgtgattgggagactattaatacggcgttagaaatccattacaacaacattctgccgggtaacggtaaatcgaaagcggacaaagtgaagaaggcggttaagaacgatcttcagaagtctatcacggagattaatgagctggtttccaattacaagttgtgctcggatgataacatcaaagctgaaacctatatccatgaaatttctcatattcttaataacttcgaggcacaagaattaaaatataacccagaaattcatctggttgagagcgaacttaaagcttcagaattaaaaaatgttttggacgtaattatgaacgccttccattggtgcagcgtgtttatgacagaggagttagtagataaggataacaacttttatgcagaattggaagagatctatgatgagatctatccagtgatttcactgtataacttagtccgtaattacgtcactcagaagccgtactcaactaaaaagatcaagttaaattttggaattccgacattggcggatggttggagtaagtctaaggaatactcaaataacgctattatcttaatgcgtgacaacctgtattacttgggtattttcaatgccaaaaataagcccgataaaaaaatcattgaagggaatacttcagaaaataagggagattacaaaaaaatgatttataaccttttgccaggcccaaacaaaatgatccccaaggtgtttttgagtagtaagacgggagtagaaacatataagccatcagcgtacattcttgaagggtacaaacaaaataaacacatcaagagcagcaaggactttgacattacattttgtcatgacttaatcgactactttaaaaattgcattgccattcaccctgagtggaaaaattttggtttcgacttcagtgatacctctacctatgaagatatctctggtttttatcgtgaggtagaacttcagggttacaagatcgattggacgtacatttccgagaaagacattgatcttttacaagagaagggtcagctttacttatttcagatctacaataaagacttttcgaaaaaatccacgggcaacgacaaccttcatacaatgtacttaaagaacctgttctctgaagaaaccttgaaagatatcgtgcttaaattgaatggcgaggccgagatttttttccgtaaaagctcgattaagaatcccatcatccacaagaaaggcagcattctggtaaatcgtacctatgaagcggaggaaaaggaccaatttggtaatattcagattgtccgtaagaacatccctgaaaatatctatcaagaattatataaatatttcaacgataagtcggacaaggaacttagcgatgaagccgcgaagttgaaaaatgttgttggtcaccacgaagcagcaacaaacattgtgaaagactatcgctacacttacgataagtactttttacatatgcctattacgattaactttaaggcaaataagacaggttttatcaacgaccgtatcctgcaatatattgcaaaagagaaggacctgcatgtcattgggattgatcgcggtgaacgcaatctgatttacgtgagtgttattgatacctgcggtaatattgttgagcaaaagtcttttaatatcgttaatggttacgactaccaaattaagcttaaacaacaggaaggtgcccgccagatcgcccgtaaggagtggaaggaaatcggaaaaattaaggaaatcaaagagggatatctgagcttggttattcatgaaatctcaaagatggttattaagtacaacgccatcatcgctatggaagacttatcgtatgggtttaaaaagggtcgtttcaaagttgagcgccaggtctaccaaaagtttgaaacgatgcttattaataaattaaactacttggttttcaaagatatctctattaccgagaatggaggtttactgaaaggataccagttaacgtatatccccgataagcttaaaaacgtgggccatcagtgtggctgtattttctatgtgcccgcggcatatacatcaaaaattgacccgacgacgggtttcgttaatatcttcaagttcaaagatctgacagttgatgcaaaacgcgaattcattaagaagttcgatagtattcgctatgactccgagaaaaatttgttttgcttcacttttgactacaataactttattactcagaatacagtcatgagtaaaagctcctggtcggtttacacgtacggggtacgcatcaaacgtcgttttgtgaatggtcgttttagtaatgagtcggatacaattgatattaccaaggatatggagaagactctggaaatgacagacatcaattggcgtgatggacatgatttgcgtcaggacattatcgactatgagattgtgcagcatattttcgaaatttttcgcctgacggtgcaaatgcgtaattccttaagcgaactggaagatcgcgactatgaccgcttaatttctcctgtgctgaatgagaacaacatcttctatgactcagcgaaagccggggacgctttgccaaaggatgcagatgctaacggtgcatattgtattgctctgaaaggcctttacgagatcaaacaaattactgaaaactggaaggaagatggaaagttttcccgtgataaattgaagatctctaataaggactggtttgactttatccaaaataaacgttattta

SEQ ID NO: 128 - protein, 1263 aa, synthetic construct
MNNGTNNFQNFIGISSLQKTLRNALIPTETTQQFIVKNGIIKEDELRGENRQILKDIMDDYYRGFISETLSSIDDIDWTSLFEKMEIQLKNGDNKDTLIKEQTEYRKAIHKKFANDDRFKNMFSAKLISDILPEFVIHNNNYSASEKEEKTQVIKLFSRFATSFKDYFKNRANCFSADDISSSSCHRIVNDNAEIFFSNALVYRRIVKSLSNDDINKISGDMKDSLKEMSLEEIYSYEKYGEFITQEGISFYNDICGKVNSFMNLYCQKNKENKNLYKLQKLHKQILCIADTSYEVPYKFESDEEVYQSVNGFLDNISSKHIVERLRKIGDNYNGYNLDKIYIVSKFYESVSQKTYRDWETINTALEIHYNNILPGNGKSKADKVKKAVKNDLQKSITEINELVSNYKLCSDDNIKAETYIHEISHILNNFEAQELKYNPEIHLVESELKASELKNVLDVIMNAFHWCSVFMTEELVDKDNNFYAELEEIYDEIYPVISLYNLVRNYVTQKPYSTKKIKLNFGIPTLADGWSKSKEYSNNAIILMRDNLYYLGIFNAKNKPDKKIIEGNTSENKGDYKKMIYNLLPGPNKMIPKVFLSSKTGVETYKPSAYILEGYKQNKHIKSSKDFDITFCHDLIDYFKNCIAIHPEWKNFGFDFSDTSTYEDISGFYREVELQGYKIDWTYISEKDIDLLQEKGQLYLFQIYNKDFSKKSTGNDNLHTMYLKNLFSEETLKDIVLKLNGEAEIFFRKSSIKNPIIHKKGSILVNRTYEAEEKDQFGNIQIVRKNIPENIYQELYKYFNDKSDKELSDEAAKLKNVVGHHEAATNIVKDYRYTYDKYFLHMPITINFKANKTGFINDRILQYIAKEKDLHVIGIDRGERNLIYVSVIDTCGNIVEQKSFNIVNGYDYQIKLKQQEGARQIARKEWKEIGKIKEIKEGYLSLVIHEISKMVIKYNAIIAMEDLSYGFKKGRFKVERQVYQKFETMLINKLNYLVFKDISITENGGLLKGYQLTYIPDKLKNVGHQCGCIFYVPAAYTSKIDPTTGFVNIFKFKDLTVDAKREFIKKFDSIRYDSEKNLFCFTFDYNNFITQNTVMSKSSWSVYTYGVRIKRRFVNGRFSNESDTIDITKDMEKTLEMTDINWRDGHDLRQDIIDYEIVQHIFEIFRLTVQMRNSLSELEDRDYDRLISPVLNENNIFYDSAKAGDALPKDADANGAYCIALKGLYEIKQITENWKEDGKFSRDKLKISNKDWFDFIQNKRYL

SEQ ID NO: 129 - DNA, 3789 bp, synthetic construct
  source 1..3789: mol_type = other DNA
atgaataacggtaccaataactttcaaaattttatcgggatctcctcgttgcaaaaaactcttcgtaatgctttaatcccgactgagacaacacagcagttcatcgttaaaaacggcatcattaaagaagatgagctgcgcggcgagaaccgtcagattttaaaggacatcatggacgactattaccgtgggttcatctcagaaacattaagcagcatcgatgatatcgactggacctcactgtttgagaagatggagattcaacttaagaatggagacaacaaagacactttaattaaggagcagacggaatatcgtaaagctatccataaaaaatttgcaaacgatgaccgtttcaaaaatatgttttccgcaaaattgattagcgacattttacctgaattcgtaatccataacaacaactattccgcatctgaaaaagaggagaagacccaagttatcaaacttttttcacgtttcgcgacatcttttaaagactactttaagaatcgtgcgaattgtttcagtgcagatgatatttcgtctagttcatgtcaccgtatcgtgaatgacaacgctgagattttcttttctaatgcgttggtgtatcgccgcatcgtaaagtccttgtcgaatgatgatatcaacaaaattagtggtgacatgaaagactccctgaaagaaatgtcattagaggagatttacagctacgaaaaatacggagagttcatcactcaggaaggtatctccttttacaacgatatttgcggcaaagttaatagtttcatgaatctgtattgtcagaagaataaggaaaacaagaatctgtacaagttacaaaagcttcataaacagatcttgtgcatcgccgacacgtcttatgaagtcccgtataaatttgaaagcgacgaagaagtatatcagagtgtgaatggattcttggacaatatctcatcaaaacacattgttgaacgtttgcgcaaaatcggcgacaactataacggatacaacttggataaaatttatatcgtatcaaaattttatgaatcagtatcccaaaagacttaccgtgattgggagactattaatacggcgttagaaatccattacaacaacattctgccgggtaacggtaaatcgaaagcggacaaagtgaagaaggcggttaagaacgatcttcagaagtctatcacggagattaatgagctggtttccaattacaagttgtgctcggatgataacatcaaagctgaaacctatatccatgaaatttctcatattcttaataacttcgaggcacaagaattaaaatataacccagaaattcatctggttgagagcgaacttaaagcttcagaattaaaaaatgttttggacgtaattatgaacgccttccattggtgcagcgtgtttatgacagaggagttagtagataaggataacaacttttatgcagaattggaagagatctatgatgagatctatccagtgatttcactgtataacttagtccgtaattacgtcactcagaagccgtactcaactaaaaagatcaagttaaattttggaattccgacattggcggatggttggagtaagtctaaggaatactcaaataacgctattatcttaatgcgtgacaacctgtattacttgggtattttcaatgccaaaaataagcccgataaaaaaatcattgaagggaatacttcagaaaataagggagattacaaaaaaatgatttataaccttttgccaggcccaaacaaaatgatccccaaggtgtttttgagtagtaagacgggagtagaaacatataagccatcagcgtacattcttgaagggtacaaacaaaataaacacatcaagagcagcaaggactttgacattacattttgtcatgacttaatcgactactttaaaaattgcattgccattcaccctgagtggaaaaattttggtttcgacttcagtgatacctctacctatgaagatatctctggtttttatcgtgaggtagaacttcagggttacaagatcgattggacgtacatttccgagaaagacattgatcttttacaagagaagggtcagctttacttatttcagatctacaataaagacttttcgaaaaaatccacgggcaacgacaaccttcatacaatgtacttaaagaacctgttctctgaagaaaacttgaaagatatcgtgcttaaattgaatggcgagaccgagatttttttccgtaaaagctcgattaagaatcccatcatccacaagaaaggcagcattctggtaaatcgtacctatgaagcggaggaaaaggaccaatttggtaatattcagattgtccgtaagaacatccctgaaaatatctatcaagaattatataaatatttcaacgataagtcggacaaggaacttagcgatgaagccgcgaagttgaaaaatgttgttggtcaccacgaagcagcaacaaacattgtgaaagactatcgctacacttacgataagtactttttacatatgcctattacgattaactttaaggcaaataagacaggttttatcaacgaccgtatcctgcaatatattgcaaaagagaaggacctgcatgtcattgggattgatcgcggtgaacgcaatctgatttacgtgagtgttattgatacctgcggtaatattgttgagcaaaagtcttttaatatcgttaatggttacgactaccaaattaagcttaaacaacaggaaggtgcccgccagatcgcccgtaaggagtggaaggaaatcggaaaaattaaggaaatcaaagagggatatctgagcttggttattcatgaaatctcaaagatggttattaagtacaacgccatcatcgctatggaagacttatcgtatgggtttaaaaagggtcgtttcaaagttgagcgccaggtctaccaaaagtttgaaacgatgcttattaataaattaaactacttggttttcaaagatatctctattaccgagaatggaggtttactgaaaggataccagttaacgtatatccccgataagcttaaaaacgtgggccatcagtgtggctgtattttctatgtgcccgcggcatatacatcaaaaattgacccgacgacgggtttcgttaatatcttcaagttcaaagatctgacagttgatgcaaaacgcgaattcattaagaagttcgatagtattcgctatgactccgagaaaaatttgttttgcttcacttttgactacaataactttattactcagaatacagtcatgagtaaaagctcctggtcggtttacacgtacggggtacgcatcaaacgtcgttttgtgaatggtcgttttagtaatgagtcggatacaattgatattaccaaggatatggagaagactctggaaatgacagacatcaattggcgtgatggacatgatttgcgtcaggacattatcgactatgagattgtgcagcatattttcgaaatttttcgcctgacggtgcaaatgcgtaattccttaagcgaactggaagatcgcgactatgaccgcttaatttctcctgtgctgaatgagaacaacatcttctatgactcagcgaaagccggggacgctttgccaaaggatgcagatgctaacggtgcatattgtattgctctgaaaggcctttacgagatcaaacaaattactgaaaactggaaggaagatggaaagttttcccgtgataaattgaagatctctaataaggactggtttgactttatccaaaataaacgttattta

SEQ ID NO: 130 - protein, 1263 aa, synthetic construct
MNNGTNNFQNFIGISSLQKTLRNALIPTETTQQFIVKNGIIKEDELRGENRQILKDIMDDYYRGFISETLSSIDDIDWTSLFEKMEIQLKNGDNKDTLIKEQTEYRKAIHKKFANDDRFKNMFSAKLISDILPEFVIHNNNYSASEKEEKTQVIKLFSRFATSFKDYFKNRANCFSADDISSSSCHRIVNDNAEIFFSNALVYRRIVKSLSNDDINKISGDMKDSLKEMSLEEIYSYEKYGEFITQEGISFYNDICGKVNSFMNLYCQKNKENKNLYKLQKLHKQILCIADTSYEVPYKFESDEEVYQSVNGFLDNISSKHIVERLRKIGDNYNGYNLDKIYIVSKFYESVSQKTYRDWETINTALEIHYNNILPGNGKSKADKVKKAVKNDLQKSITEINELVSNYKLCSDDNIKAETYIHEISHILNNFEAQELKYNPEIHLVESELKASELKNVLDVIMNAFHWCSVFMTEELVDKDNNFYAELEEIYDEIYPVISLYNLVRNYVTQKPYSTKKIKLNFGIPTLADGWSKSKEYSNNAIILMRDNLYYLGIFNAKNKPDKKIIEGNTSENKGDYKKMIYNLLPGPNKMIPKVFLSSKTGVETYKPSAYILEGYKQNKHIKSSKDFDITFCHDLIDYFKNCIAIHPEWKNFGFDFSDTSTYEDISGFYREVELQGYKIDWTYISEKDIDLLQEKGQLYLFQIYNKDFSKKSTGNDNLHTMYLKNLFSEENLKDIVLKLNGETEIFFRKSSIKNPIIHKKGSILVNRTYEAEEKDQFGNIQIVRKNIPENIYQELYKYFNDKSDKELSDEAAKLKNVVGHHEAATNIVKDYRYTYDKYFLHMPITINFKANKTGFINDRILQYIAKEKDLHVIGIDRGERNLIYVSVIDTCGNIVEQKSFNIVNGYDYQIKLKQQEGARQIARKEWKEIGKIKEIKEGYLSLVIHEISKMVIKYNAIIAMEDLSYGFKKGRFKVERQVYQKFETMLINKLNYLVFKDISITENGGLLKGYQLTYIPDKLKNVGHQCGCIFYVPAAYTSKIDPTTGFVNIFKFKDLTVDAKREFIKKFDSIRYDSEKNLFCFTFDYNNFITQNTVMSKSSWSVYTYGVRIKRRFVNGRFSNESDTIDITKDMEKTLEMTDINWRDGHDLRQDIIDYEIVQHIFEIFRLTVQMRNSLSELEDRDYDRLISPVLNENNIFYDSAKAGDALPKDADANGAYCIALKGLYEIKQITENWKEDGKFSRDKLKISNKDWFDFIQNKRYL

SEQ ID NO: 131 - DNA, 3789 bp, synthetic construct
  source 1..3789: mol_type = other DNA
atgaataacggtaccaataactttcaaaattttatcgggatctcctcgttgcaaaaaactcttcgtaatgctttaatcccgactgagacaacacagcagttcatcgttaaaaacggcatcattaaagaagatgagctgcgcggcgagaaccgtcagattttaaaggacatcatggacgactattaccgtgggttcatctcagaaacattaagcagcatcgatgatatcgactggacctcactgtttgagaagatggagattcaacttaagaatggagacaacaaagacactttaattaaggagcagacggaatatcgtaaagctatccataaaaaatttgcaaacgatgaccgtttcaaaaatatgttttccgcaaaattgattagcgacattttacctgaattcgtaatccataacaacaactattccgcatctgaaaaagaggagaagacccaagttatcaaacttttttcacgtttcgcgacatcttttaaagactactttaagaatcgtgcgaattgtttcagtgcagatgatatttcgtctagttcatgtcaccgtatcgtgaatgacaacgctgagattttcttttctaatgcgttggtgtatcgccgcatcgtaaagtccttgtcgaatgatgatatcaacaaaattagtggtgacatgaaagactccctgaaagaaatgtcattagaggagatttacagctacgaaaaatacggagagttcatcactcaggaaggtatctccttttacaacgatatttgcggcaaagttaatagtttcatgaatctgtattgtcagaagaataaggaaaacaagaatctgtacaagttacaaaagcttcataaacagatcttgtgcatcgccgacacgtcttatgaagtcccgtataaatttgaaagcgacgaagaagtatatcagagtgtgaatggattcttggacaatatctcatcaaaacacattgttgaacgtttgcgcaaaatcggcgacaactataacggatacaacttggataaaatttatatcgtatcaaaattttatgaatcagtatcccaaaagacttaccgtgattgggagactattaatacggcgttagaaatccattacaacaacattctgccgggtaacggtaaatcgaaagcggacaaagtgaagaaggcggttaagaacgatcttcagaagtctatcacggagattaatgagctggtttccaattacaagttgtgctcggatgataacatcaaagctgaaacctatatccatgaaatttctcatattcttaataacttcgaggcacaagaattaaaatataacccagaaattcatctggttgagagcgaacttaaagcttcagaattaaaaaatgttttggacgtaattatgaacgccttccattggtgcagcgtgtttatgacagaggagttagtagataaggataacaacttttatgcagaattggaagagatctatgatgagatctatccagtgatttcactgtataacttagtccgtaattacgtcactcagaagccgtactcaactaaaaagatcaagttaaattttggaattccgacattggcggatggttggagtaagtctaaggaatactcaaataacgctattatcttaatgcgtgacaacctgtattacttgggtattttcaatgccaaaaataagcccgataaaaaaatcattgaagggaatacttcagaaaataagggagattacaaaaaaatgatttataaccttttgccaggcccaaacaaaatgatccccaaggtgtttttgagtagtaagacgggagtagaaacatataagccatcagcgtacattcttgaagggtacaaacaaaataaacacatcaagagcagcaaggactttgacattacattttgtcatgacttaatcgactactttaaaaattgcattgccattcaccctgagtggaaaaattttggtttcgacttcagtgatacctctacctatgaagatatctctggtttttatcgtgaggtagaacttcagggttacaagatcgattggacgtacatttccgagaaagacattgatcttttacaagagaagggtcagctttacttatttcagatctacaataaagacttttcgaaaaaatccacgggcaacgacaaccttcatacaatgtacttaaagaacctgttctctgaagaaaacttgaaagatatcgtgcttaaattgaatggcgagccggagatttttttccgtaaaagctcgattaagaatcccatcatccacaagaaaggcagcattctggtaaatcgtacctatgaagcggaggaaaaggaccaatttggtaatattcagattgtccgtaagaacatccctgaaaatatctatcaagaattatataaatatttcaacgataagtcggacaaggaacttagcgatgaagccgcgaagttgaaaaatgttgttggtcaccacgaagcagcaacaaacattgtgaaagactatcgctacacttacgataagtactttttacatatgcctattacgattaactttaaggcaaataagacaggttttatcaacgaccgtatcctgcaatatattgcaaaagagaaggacctgcatgtcattgggattgatcgcggtgaacgcaatctgatttacgtgagtgttattgatacctgcggtaatattgttgagcaaaagtcttttaatatcgttaatggttacgactaccaaattaagcttaaacaacaggaaggtgcccgccagatcgcccgtaaggagtggaaggaaatcggaaaaattaaggaaatcaaagagggatatctgagcttggttattcatgaaatctcaaagatggttattaagtacaacgccatcatcgctatggaagacttatcgtatgggtttaaaaagggtcgtttcaaagttgagcgccaggtctaccaaaagtttgaaacgatgcttattaataaattaaactacttggttttcaaagatatctctattaccgagaatggaggtttactgaaaggataccagttaacgtatatccccgataagcttaaaaacgtgggccatcagtgtggctgtattttctatgtgcccgcggcatatacatcaaaaattgacccgacgacgggtttcgttaatatcttcaagttcaaagatctgacagttgatgcaaaacgcgaattcattaagaagttcgatagtattcgctatgactccgagaaaaatttgttttgcttcacttttgactacaataactttattactcagaatacagtcatgagtaaaagctcctggtcggtttacacgtacggggtacgcatcaaacgtcgttttgtgaatggtcgttttagtaatgagtcggatacaattgatattaccaaggatatggagaagactctggaaatgacagacatcaattggcgtgatggacatgatttgcgtcaggacattatcgactatgagattgtgcagcatattttcgaaatttttcgcctgacggtgcaaatgcgtaattccttaagcgaactggaagatcgcgactatgaccgcttaatttctcctgtgctgaatgagaacaacatcttctatgactcagcgaaagccggggacgctttgccaaaggatgcagatgctaacggtgcatattgtattgctctgaaaggcctttacgagatcaaacaaattactgaaaactggaaggaagatggaaagttttcccgtgataaattgaagatctctaataaggactggtttgactttatccaaaataaacgttattta

SEQ ID NO: 132 - protein, 1263 aa, synthetic construct
MNNGTNNFQNFIGISSLQKTLRNALIPTETTQQFIVKNGIIKEDELRGENRQILKDIMDDYYRGFISETLSSIDDIDWTSLFEKMEIQLKNGDNKDTLIKEQTEYRKAIHKKFANDDRFKNMFSAKLISDILPEFVIHNNNYSASEKEEKTQVIKLFSRFATSFKDYFKNRANCFSADDISSSSCHRIVNDNAEIFFSNALVYRRIVKSLSNDDINKISGDMKDSLKEMSLEEIYSYEKYGEFITQEGISFYNDICGKVNSFMNLYCQKNKENKNLYKLQKLHKQILCIADTSYEVPYKFESDEEVYQSVNGFLDNISSKHIVERLRKIGDNYNGYNLDKIYIVSKFYESVSQKTYRDWETINTALEIHYNNILPGNGKSKADKVKKAVKNDLQKSITEINELVSNYKLCSDDNIKAETYIHEISHILNNFEAQELKYNPEIHLVESELKASELKNVLDVIMNAFHWCSVFMTEELVDKDNNFYAELEEIYDEIYPVISLYNLVRNYVTQKPYSTKKIKLNFGIPTLADGWSKSKEYSNNAIILMRDNLYYLGIFNAKNKPDKKIIEGNTSENKGDYKKMIYNLLPGPNKMIPKVFLSSKTGVETYKPSAYILEGYKQNKHIKSSKDFDITFCHDLIDYFKNCIAIHPEWKNFGFDFSDTSTYEDISGFYREVELQGYKIDWTYISEKDIDLLQEKGQLYLFQIYNKDFSKKSTGNDNLHTMYLKNLFSEENLKDIVLKLNGEPEIFFRKSSIKNPIIHKKGSILVNRTYEAEEKDQFGNIQIVRKNIPENIYQELYKYFNDKSDKELSDEAAKLKNVVGHHEAATNIVKDYRYTYDKYFLHMPITINFKANKTGFINDRILQYIAKEKDLHVIGIDRGERNLIYVSVIDTCGNIVEQKSFNIVNGYDYQIKLKQQEGARQIARKEWKEIGKIKEIKEGYLSLVIHEISKMVIKYNAIIAMEDLSYGFKKGRFKVERQVYQKFETMLINKLNYLVFKDISITENGGLLKGYQLTYIPDKLKNVGHQCGCIFYVPAAYTSKIDPTTGFVNIFKFKDLTVDAKREFIKKFDSIRYDSEKNLFCFTFDYNNFITQNTVMSKSSWSVYTYGVRIKRRFVNGRFSNESDTIDITKDMEKTLEMTDINWRDGHDLRQDIIDYEIVQHIFEIFRLTVQMRNSLSELEDRDYDRLISPVLNENNIFYDSAKAGDALPKDADANGAYCIALKGLYEIKQITENWKEDGKFSRDKLKISNKDWFDFIQNKRYL

SEQ ID NO: 133 - DNA, 3789 bp, synthetic construct
  source 1..3789: mol_type = other DNA
atgaataacggtaccaataactttcaaaattttatcgggatctcctcgttgcaaaaaactcttcgtaatgctttaatcccgactgagacaacacagcagttcatcgttaaaaacggcatcattaaagaagatgagctgcgcggcgagaaccgtcagattttaaaggacatcatggacgactattaccgtgggttcatctcagaaacattaagcagcatcgatgatatcgactggacctcactgtttgagaagatggagattcaacttaagaatggagacaacaaagacactttaattaaggagcagacggaatatcgtaaagctatccataaaaaatttgcaaacgatgaccgtttcaaaaatatgttttccgcaaaattgattagcgacattttacctgaattcgtaatccataacaacaactattccgcatctgaaaaagaggagaagacccaagttatcaaacttttttcacgtttcgcgacatcttttaaagactactttaagaatcgtgcgaattgtttcagtgcagatgatatttcgtctagttcatgtcaccgtatcgtgaatgacaacgctgagattttcttttctaatgcgttggtgtatcgccgcatcgtaaagtccttgtcgaatgatgatatcaacaaaattagtggtgacatgaaagactccctgaaagaaatgtcattagaggagatttacagctacgaaaaatacggagagttcatcactcaggaaggtatctccttttacaacgatatttgcggcaaagttaatagtttcatgaatctgtattgtcagaagaataaggaaaacaagaatctgtacaagttacaaaagcttcataaacagatcttgtgcatcgccgacacgtcttatgaagtcccgtataaatttgaaagcgacgaagaagtatatcagagtgtgaatggattcttggacaatatctcatcaaaacacattgttgaacgtttgcgcaaaatcggcgacaactataacggatacaacttggataaaatttatatcgtatcaaaattttatgaatcagtatcccaaaagacttaccgtgattgggagactattaatacggcgttagaaatccattacaacaacattctgccgggtaacggtaaatcgaaagcggacaaagtgaagaaggcggttaagaacgatcttcagaagtctatcacggagattaatgagctggtttccaattacaagttgtgctcggatgataacatcaaagctgaaacctatatccatgaaatttctcatattcttaataacttcgaggcacaagaattaaaatataacccagaaattcatctggttgagagcgaacttaaagcttcagaattaaaaaatgttttggacgtaattatgaacgccttccattggtgcagcgtgtttatgacagaggagttagtagataaggataacaacttttatgcagaattggaagagatctatgatgagatctatccagtgatttcactgtataacttagtccgtaattacgtcactcagaagccgtactcaactaaaaagatcaagttaaattttggaattccgacattggcggatggttggagtaagtctaaggaatactcaaataacgctattatcttaatgcgtgacaacctgtattacttgggtattttcaatgccaaaaataagcccgataaaaaaatcattgaagggaatacttcagaaaataagggagattacaaaaaaatgatttataaccttttgccaggcccaaacaaaatgatccccaaggtgtttttgagtagtaagacgggagtagaaacatataagccatcagcgtacattcttgaagggtacaaacaaaataaacacatcaagagcagcaaggactttgacattacattttgtcatgacttaatcgactactttaaaaattgcattgccattcaccctgagtggaaaaattttggtttcgacttcagtgatacctctacctatgaagatatctctggtttttatcgtgaggtagaacttcagggttacaagatcgattggacgtacatttccgagaaagacattgatcttttacaagagaagggtcagctttacttatttcagatctacaataaagacttttcgaaaaaatccacgggcaacgacaaccttcatacaatgtacttaaagaacctgttctctgaagaaaacttgaaagatatcgtgcttaaattgaatggcgagaacgagatttttttccgtaaaagctcgattaagaatcccatcatccacaagaaaggcagcattctggtaaatcgtacctatgaagcggaggaaaaggaccaatttggtaatattcagattgtccgtaagaacatccctgaaaatatctatcaagaattatataaatatttcaacgataagtcggacaaggaacttagcgatgaagccgcgaagttgaaaaatgttgttggtcaccacgaagcagcaacaaacattgtgaaagactatcgctacacttacgataagtactttttacatatgcctattacgattaactttaaggcaaataagacaggttttatcaacgaccgtatcctgcaatatattgcaaaagagaaggacctgcatgtcattgggattgatcgcggtgaacgcaatctgatttacgtgagtgttattgatacctgcggtaatattgttgagcaaaagtcttttaatatcgttaatggttacgactaccaaattaagcttaaacaacaggaaggtgcccgccagatcgcccgtaaggagtggaaggaaatcggaaaaattaaggaaatcaaagagggatatctgagcttggttattcatgaaatctcaaagatggttattaagtacaacgccatcatcgctatggaagacttatcgtatgggtttaaaaagggtcgtttcaaagttgagcgccaggtctaccaaaagtttgaaacgatgcttattaataaattaaactacttggttttcaaagatatctctattaccgagaatggaggtttactgaaaggataccagttaacgtatatccccgataagcttaaaaacgtgggccatcagtgtggctgtattttctatgtgcccgcggcatatacatcaaaaattgacccgacgacgggtttcgttaatatcttcaagttcaaagatctgacagttgatgcaaaacgcgaattcattaagaagttcgatagtattcgctatgactccgagaaaaatttgttttgcttcacttttgactacaataactttattactcagaatacagtcatgagtaaaagctcctggtcggtttacacgtacggggtacgcatcaaacgtcgttttgtgaatggtcgttttagtaatgagtcggatacaattgatattaccaaggatatggagaagactctggaaatgacagacatcaattggcgtgatggacatgatttgcgtcaggacattatcgactatgagattgtgcagcatattttcgaaatttttcgcctgacggtgcaaatgcgtaattccttaagcgaactggaagatcgcgactatgaccgcttaatttctcctgtgctgaatgagaacaacatcttctatgactcagcgaaagccggggacgctttgccaaaggatgcagatgctaacggtgcatattgtattgctctgaaaggcctttacgagatcaaacaaattactgaaaactggaaggaagatggaaagttttcccgtgataaattgaagatctctaataaggactggtttgactttatccaaaataaacgttattta

SEQ ID NO: 134 - protein, 1263 aa, synthetic construct
MNNGTNNFQNFIGISSLQKTLRNALIPTETTQQFIVKNGIIKEDELRGENRQILKDIMDDYYRGFISETLSSIDDIDWTSLFEKMEIQLKNGDNKDTLIKEQTEYRKAIHKKFANDDRFKNMFSAKLISDILPEFVIHNNNYSASEKEEKTQVIKLFSRFATSFKDYFKNRANCFSADDISSSSCHRIVNDNAEIFFSNALVYRRIVKSLSNDDINKISGDMKDSLKEMSLEEIYSYEKYGEFITQEGISFYNDICGKVNSFMNLYCQKNKENKNLYKLQKLHKQILCIADTSYEVPYKFESDEEVYQSVNGFLDNISSKHIVERLRKIGDNYNGYNLDKIYIVSKFYESVSQKTYRDWETINTALEIHYNNILPGNGKSKADKVKKAVKNDLQKSITEINELVSNYKLCSDDNIKAETYIHEISHILNNFEAQELKYNPEIHLVESELKASELKNVLDVIMNAFHWCSVFMTEELVDKDNNFYAELEEIYDEIYPVISLYNLVRNYVTQKPYSTKKIKLNFGIPTLADGWSKSKEYSNNAIILMRDNLYYLGIFNAKNKPDKKIIEGNTSENKGDYKKMIYNLLPGPNKMIPKVFLSSKTGVETYKPSAYILEGYKQNKHIKSSKDFDITFCHDLIDYFKNCIAIHPEWKNFGFDFSDTSTYEDISGFYREVELQGYKIDWTYISEKDIDLLQEKGQLYLFQIYNKDFSKKSTGNDNLHTMYLKNLFSEENLKDIVLKLNGENEIFFRKSSIKNPIIHKKGSILVNRTYEAEEKDQFGNIQIVRKNIPENIYQELYKYFNDKSDKELSDEAAKLKNVVGHHEAATNIVKDYRYTYDKYFLHMPITINFKANKTGFINDRILQYIAKEKDLHVIGIDRGERNLIYVSVIDTCGNIVEQKSFNIVNGYDYQIKLKQQEGARQIARKEWKEIGKIKEIKEGYLSLVIHEISKMVIKYNAIIAMEDLSYGFKKGRFKVERQVYQKFETMLINKLNYLVFKDISITENGGLLKGYQLTYIPDKLKNVGHQCGCIFYVPAAYTSKIDPTTGFVNIFKFKDLTVDAKREFIKKFDSIRYDSEKNLFCFTFDYNNFITQNTVMSKSSWSVYTYGVRIKRRFVNGRFSNESDTIDITKDMEKTLEMTDINWRDGHDLRQDIIDYEIVQHIFEIFRLTVQMRNSLSELEDRDYDRLISPVLNENNIFYDSAKAGDALPKDADANGAYCIALKGLYEIKQITENWKEDGKFSRDKLKISNKDWFDFIQNKRYL

SEQ ID NO: 135 - DNA, 3789 bp, synthetic construct
  source 1..3789: mol_type = other DNA
atgaataacggtaccaataactttcaaaattttatcgggatctcctcgttgcaaaaaactcttcgtaatgctttaatcccgactgagacaacacagcagttcatcgttaaaaacggcatcattaaagaagatgagctgcgcggcgagaaccgtcagattttaaaggacatcatggacgactattaccgtgggttcatctcagaaacattaagcagcatcgatgatatcgactggacctcactgtttgagaagatggagattcaacttaagaatggagacaacaaagacactttaattaaggagcagacggaatatcgtaaagctatccataaaaaatttgcaaacgatgaccgtttcaaaaatatgttttccgcaaaattgattagcgacattttacctgaattcgtaatccataacaacaactattccgcatctgaaaaagaggagaagacccaagttatcaaacttttttcacgtttcgcgacatcttttaaagactactttaagaatcgtgcgaattgtttcagtgcagatgatatttcgtctagttcatgtcaccgtatcgtgaatgacaacgctgagattttcttttctaatgcgttggtgtatcgccgcatcgtaaagtccttgtcgaatgatgatatcaacaaaattagtggtgacatgaaagactccctgaaagaaatgtcattagaggagatttacagctacgaaaaatacggagagttcatcactcaggaaggtatctccttttacaacgatatttgcggcaaagttaatagtttcatgaatctgtattgtcagaagaataaggaaaacaagaatctgtacaagttacaaaagcttcataaacagatcttgtgcatcgccgacacgtcttatgaagtcccgtataaatttgaaagcgacgaagaagtatatcagagtgtgaatggattcttggacaatatctcatcaaaacacattgttgaacgtttgcgcaaaatcggcgacaactataacggatacaacttggataaaatttatatcgtatcaaaattttatgaatcagtatcccaaaagacttaccgtgattgggagactattaatacggcgttagaaatccattacaacaacattctgccgggtaacggtaaatcgaaagcggacaaagtgaagaaggcggttaagaacgatcttcagaagtctatcacggagattaatgagctggtttccaattacaagttgtgctcggatgataacatcaaagctgaaacctatatccatgaaatttctcatattcttaataacttcgaggcacaagaattaaaatataacccagaaattcatctggttgagagcgaacttaaagcttcagaattaaaaaatgttttggacgtaattatgaacgccttccattggtgcagcgtgtttatgacagaggagttagtagataaggataacaacttttatgcagaattggaagagatctatgatgagatctatccagtgatttcactgtataacttagtccgtaattacgtcactcagaagccgtactcaactaaaaagatcaagttaaattttggaattccgacattggcggatggttggagtaagtctaaggaatactcaaataacgctattatcttaatgcgtgacaacctgtattacttgggtattttcaatgccaaaaataagcccgataaaaaaatcattgaagggaatacttcagaaaataagggagattacaaaaaaatgatttataaccttttgccaggcccaaacaaaatgatccccaaggtgtttttgagtagtaagacgggagtagaaacatataagccatcagcgtacattcttgaagggtacaaacaaaataaacacatcaagagcagcaaggactttgacattacattttgtcatgacttaatcgactactttaaaaattgcattgccattcaccctgagtggaaaaattttggtttcgacttcagtgatacctctacctatgaagatatctctggtttttatcgtgaggtagaacttcagggttacaagatcgattggacgtacatttccgagaaagacattgatcttttacaagagaagggtcagctttacttatttcagatctacaataaagacttttcgaaaaaatccacgggcaacgacaaccttcatacaatgtacttaaagaacctgttctctgaagaaaacttgaaagatatcgtgcttaaattgaatggcgaggccgagatttttgcgcgtaaaagctcgattaagaatcccatcatccacaagaaaggcagcattctggtaaatcgtacctatgaagcggaggaaaaggaccaatttggtaatattcagattgtccgtaagaacatccctgaaaatatctatcaagaattatataaatatttcaacgataagtcggacaaggaacttagcgatgaagccgcgaagttgaaaaatgttgttggtcaccacgaagcagcaacaaacattgtgaaagactatcgctacacttacgataagtactttttacatatgcctattacgattaactttaaggcaaataagacaggttttatcaacgaccgtatcctgcaatatattgcaaaagagaaggacctgcatgtcattgggattgatcgcggtgaacgcaatctgatttacgtgagtgttattgatacctgcggtaatattgttgagcaaaagtcttttaatatcgttaatggttacgactaccaaattaagcttaaacaacaggaaggtgcccgccagatcgcccgtaaggagtggaaggaaatcggaaaaattaaggaaatcaaagagggatatctgagcttggttattcatgaaatctcaaagatggttattaagtacaacgccatcatcgctatggaagacttatcgtatgggtttaaaaagggtcgtttcaaagttgagcgccaggtctaccaaaagtttgaaacgatgcttattaataaattaaactacttggttttcaaagatatctctattaccgagaatggaggtttactgaaaggataccagttaacgtatatccccgataagcttaaaaacgtgggccatcagtgtggctgtattttctatgtgcccgcggcatatacatcaaaaattgacccgacgacgggtttcgttaatatcttcaagttcaaagatctgacagttgatgcaaaacgcgaattcattaagaagttcgatagtattcgctatgactccgagaaaaatttgttttgcttcacttttgactacaataactttattactcagaatacagtcatgagtaaaagctcctggtcggtttacacgtacggggtacgcatcaaacgtcgttttgtgaatggtcgttttagtaatgagtcggatacaattgatattaccaaggatatggagaagactctggaaatgacagacatcaattggcgtgatggacatgatttgcgtcaggacattatcgactatgagattgtgcagcatattttcgaaatttttcgcctgacggtgcaaatgcgtaattccttaagcgaactggaagatcgcgactatgaccgcttaatttctcctgtgctgaatgagaacaacatcttctatgactcagcgaaagccggggacgctttgccaaaggatgcagatgctaacggtgcatattgtattgctctgaaaggcctttacgagatcaaacaaattactgaaaactggaaggaagatggaaagttttcccgtgataaattgaagatctctaataaggactggtttgactttatccaaaataaacgttattta

SEQ ID NO: 136 - protein, 1263 aa, synthetic construct
MNNGTNNFQNFIGISSLQKTLRNALIPTETTQQFIVKNGIIKEDELRGENRQILKDIMDDYYRGFISETLSSIDDIDWTSLFEKMEIQLKNGDNKDTLIKEQTEYRKAIHKKFANDDRFKNMFSAKLISDILPEFVIHNNNYSASEKEEKTQVIKLFSRFATSFKDYFKNRANCFSADDISSSSCHRIVNDNAEIFFSNALVYRRIVKSLSNDDINKISGDMKDSLKEMSLEEIYSYEKYGEFITQEGISFYNDICGKVNSFMNLYCQKNKENKNLYKLQKLHKQILCIADTSYEVPYKFESDEEVYQSVNGFLDNISSKHIVERLRKIGDNYNGYNLDKIYIVSKFYESVSQKTYRDWETINTALEIHYNNILPGNGKSKADKVKKAVKNDLQKSITEINELVSNYKLCSDDNIKAETYIHEISHILNNFEAQELKYNPEIHLVESELKASELKNVLDVIMNAFHWCSVFMTEELVDKDNNFYAELEEIYDEIYPVISLYNLVRNYVTQKPYSTKKIKLNFGIPTLADGWSKSKEYSNNAIILMRDNLYYLGIFNAKNKPDKKIIEGNTSENKGDYKKMIYNLLPGPNKMIPKVFLSSKTGVETYKPSAYILEGYKQNKHIKSSKDFDITFCHDLIDYFKNCIAIHPEWKNFGFDFSDTSTYEDISGFYREVELQGYKIDWTYISEKDIDLLQEKGQLYLFQIYNKDFSKKSTGNDNLHTMYLKNLFSEENLKDIVLKLNGEAEIFARKSSIKNPIIHKKGSILVNRTYEAEEKDQFGNIQIVRKNIPENIYQELYKYFNDKSDKELSDEAAKLKNVVGHHEAATNIVKDYRYTYDKYFLHMPITINFKANKTGFINDRILQYIAKEKDLHVIGIDRGERNLIYVSVIDTCGNIVEQKSFNIVNGYDYQIKLKQQEGARQIARKEWKEIGKIKEIKEGYLSLVIHEISKMVIKYNAIIAMEDLSYGFKKGRFKVERQVYQKFETMLINKLNYLVFKDISITENGGLLKGYQLTYIPDKLKNVGHQCGCIFYVPAAYTSKIDPTTGFVNIFKFKDLTVDAKREFIKKFDSIRYDSEKNLFCFTFDYNNFITQNTVMSKSSWSVYTYGVRIKRRFVNGRFSNESDTIDITKDMEKTLEMTDINWRDGHDLRQDIIDYEIVQHIFEIFRLTVQMRNSLSELEDRDYDRLISPVLNENNIFYDSAKAGDALPKDADANGAYCIALKGLYEIKQITENWKEDGKFSRDKLKISNKDWFDFIQNKRYL

SEQ ID NO: 137 - DNA, 3789 bp, synthetic construct
  source 1..3789: mol_type = other DNA
atgaataacggtaccaataactttcaaaattttatcgggatctcctcgttgcaaaaaactcttcgtaatgctttaatcccgactgagacaacacagcagttcatcgttaaaaacggcatcattaaagaagatgagctgcgcggcgagaaccgtcagattttaaaggacatcatggacgactattaccgtgggttcatctcagaaacattaagcagcatcgatgatatcgactggacctcactgtttgagaagatggagattcaacttaagaatggagacaacaaagacactttaattaaggagcagacggaatatcgtaaagctatccataaaaaatttgcaaacgatgaccgtttcaaaaatatgttttccgcaaaattgattagcgacattttacctgaattcgtaatccataacaacaactattccgcatctgaaaaagaggagaagacccaagttatcaaacttttttcacgtttcgcgacatcttttaaagactactttaagaatcgtgcgaattgtttcagtgcagatgatatttcgtctagttcatgtcaccgtatcgtgaatgacaacgctgagattttcttttctaatgcgttggtgtatcgccgcatcgtaaagtccttgtcgaatgatgatatcaacaaaattagtggtgacatgaaagactccctgaaagaaatgtcattagaggagatttacagctacgaaaaatacggagagttcatcactcaggaaggtatctccttttacaacgatatttgcggcaaagttaatagtttcatgaatctgtattgtcagaagaataaggaaaacaagaatctgtacaagttacaaaagcttcataaacagatcttgtgcatcgccgacacgtcttatgaagtcccgtataaatttgaaagcgacgaagaagtatatcagagtgtgaatggattcttggacaatatctcatcaaaacacattgttgaacgtttgcgcaaaatcggcgacaactataacggatacaacttggataaaatttatatcgtatcaaaattttatgaatcagtatcccaaaagacttaccgtgattgggagactattaatacggcgttagaaatccattacaacaacattctgccgggtaacggtaaatcgaaagcggacaaagtgaagaaggcggttaagaacgatcttcagaagtctatcacggagattaatgagctggtttccaattacaagttgtgctcggatgataacatcaaagctgaaacctatatccatgaaatttctcatattcttaataacttcgaggcacaagaattaaaatataacccagaaattcatctggttgagagcgaacttaaagcttcagaattaaaaaatgttttggacgtaattatgaacgccttccattggtgcagcgtgtttatgacagaggagttagtagataaggataacaacttttatgcagaattggaagagatctatgatgagatctatccagtgatttcactgtataacttagtccgtaattacgtcactcagaagccgtactcaactaaaaagatcaagttaaattttggaattccgacattggcggatggttggagtaagtctaaggaatactcaaataacgctattatcttaatgcgtgacaacctgtattacttgggtattttcaatgccaaaaataagcccgataaaaaaatcattgaagggaatacttcagaaaataagggagattacaaaaaaatgatttataaccttttgccaggcccaaacaaaatgatccccaaggtgtttttgagtagtaagacgggagtagaaacatataagccatcagcgtacattcttgaagggtacaaacaaaataaacacatcaagagcagcaaggactttgacattacattttgtcatgacttaatcgactactttaaaaattgcattgccattcaccctgagtggaaaaattttggtttcgacttcagtgatacctctacctatgaagatatctctggtttttatcgtgaggtagaacttcagggttacaagatcgattggacgtacatttccgagaaagacattgatcttttacaagagaagggtcagctttacttatttcagatctacaataaagacttttcgaaaaaatccacgggcaacgacaaccttcatacaatgtacttaaagaacctgttctctgaagaaaacttgaaagatatcgtgcttaaattgaatggcgaggccgagatttttttccgtaaagcgtcgattaagaatcccatcatccacaagaaaggcagcattctggtaaatcgtacctatgaagcggaggaaaaggaccaatttggtaatattcagattgtccgtaagaacatccctgaaaatatctatcaagaattatataaatatttcaacgataagtcggacaaggaacttagcgatgaagccgcgaagttgaaaaatgttgttggtcaccacgaagcagcaacaaacattgtgaaagactatcgctacacttacgataagtactttttacatatgcctattacgattaactttaaggcaaataagacaggttttatcaacgaccgtatcctgcaatatattgcaaaagagaaggacctgcatgtcattgggattgatcgcggtgaacgcaatctgatttacgtgagtgttattgatacctgcggtaatattgttgagcaaaagtcttttaatatcgttaatggttacgactaccaaattaagcttaaacaacaggaaggtgcccgccagatcgcccgtaaggagtggaaggaaatcggaaaaattaaggaaatcaaagagggatatctgagcttggttattcatgaaatctcaaagatggttattaagtacaacgccatcatcgctatggaagacttatcgtatgggtttaaaaagggtcgtttcaaagttgagcgccaggtctaccaaaagtttgaaacgatgcttattaataaattaaactacttggttttcaaagatatctctattaccgagaatggaggtttactgaaaggataccagttaacgtatatccccgataagcttaaaaacgtgggccatcagtgtggctgtattttctatgtgcccgcggcatatacatcaaaaattgacccgacgacgggtttcgttaatatcttcaagttcaaagatctgacagttgatgcaaaacgcgaattcattaagaagttcgatagtattcgctatgactccgagaaaaatttgttttgcttcacttttgactacaataactttattactcagaatacagtcatgagtaaaagctcctggtcggtttacacgtacggggtacgcatcaaacgtcgttttgtgaatggtcgttttagtaatgagtcggatacaattgatattaccaaggatatggagaagactctggaaatgacagacatcaattggcgtgatggacatgatttgcgtcaggacattatcgactatgagattgtgcagcatattttcgaaatttttcgcctgacggtgcaaatgcgtaattccttaagcgaactggaagatcgcgactatgaccgcttaatttctcctgtgctgaatgagaacaacatcttctatgactcagcgaaagccggggacgctttgccaaaggatgcagatgctaacggtgcatattgtattgctctgaaaggcctttacgagatcaaacaaattactgaaaactggaaggaagatggaaagttttcccgtgataaattgaagatctctaataaggactggtttgactttatccaaaataaacgttattta

SEQ ID NO: 138 - protein, 1263 aa, synthetic construct
MNNGTNNFQNFIGISSLQKTLRNALIPTETTQQFIVKNGIIKEDELRGENRQILKDIMDDYYRGFISETLSSIDDIDWTSLFEKMEIQLKNGDNKDTLIKEQTEYRKAIHKKFANDDRFKNMFSAKLISDILPEFVIHNNNYSASEKEEKTQVIKLFSRFATSFKDYFKNRANCFSADDISSSSCHRIVNDNAEIFFSNALVYRRIVKSLSNDDINKISGDMKDSLKEMSLEEIYSYEKYGEFITQEGISFYNDICGKVNSFMNLYCQKNKENKNLYKLQKLHKQILCIADTSYEVPYKFESDEEVYQSVNGFLDNISSKHIVERLRKIGDNYNGYNLDKIYIVSKFYESVSQKTYRDWETINTALEIHYNNILPGNGKSKADKVKKAVKNDLQKSITEINELVSNYKLCSDDNIKAETYIHEISHILNNFEAQELKYNPEIHLVESELKASELKNVLDVIMNAFHWCSVFMTEELVDKDNNFYAELEEIYDEIYPVISLYNLVRNYVTQKPYSTKKIKLNFGIPTLADGWSKSKEYSNNAIILMRDNLYYLGIFNAKNKPDKKIIEGNTSENKGDYKKMIYNLLPGPNKMIPKVFLSSKTGVETYKPSAYILEGYKQNKHIKSSKDFDITFCHDLIDYFKNCIAIHPEWKNFGFDFSDTSTYEDISGFYREVELQGYKIDWTYISEKDIDLLQEKGQLYLFQIYNKDFSKKSTGNDNLHTMYLKNLFSEENLKDIVLKLNGEAEIFFRKASIKNPIIHKKGSILVNRTYEAEEKDQFGNIQIVRKNIPENIYQELYKYFNDKSDKELSDEAAKLKNVVGHHEAATNIVKDYRYTYDKYFLHMPITINFKANKTGFINDRILQYIAKEKDLHVIGIDRGERNLIYVSVIDTCGNIVEQKSFNIVNGYDYQIKLKQQEGARQIARKEWKEIGKIKEIKEGYLSLVIHEISKMVIKYNAIIAMEDLSYGFKKGRFKVERQVYQKFETMLINKLNYLVFKDISITENGGLLKGYQLTYIPDKLKNVGHQCGCIFYVPAAYTSKIDPTTGFVNIFKFKDLTVDAKREFIKKFDSIRYDSEKNLFCFTFDYNNFITQNTVMSKSSWSVYTYGVRIKRRFVNGRFSNESDTIDITKDMEKTLEMTDINWRDGHDLRQDIIDYEIVQHIFEIFRLTVQMRNSLSELEDRDYDRLISPVLNENNIFYDSAKAGDALPKDADANGAYCIALKGLYEIKQITENWKEDGKFSRDKLKISNKDWFDFIQNKRYL

SEQ ID NO: 139 - DNA, 3789 bp, synthetic construct
  source 1..3789: mol_type = other DNA
atgaataacggtaccaataactttcaaaattttatcgggatctcctcgttgcaaaaaactcttcgtaatgctttaatcccgactgagacaacacagcagttcatcgttaaaaacggcatcattaaagaagatgagctgcgcggcgagaaccgtcagattttaaaggacatcatggacgactattaccgtgggttcatctcagaaacattaagcagcatcgatgatatcgactggacctcactgtttgagaagatggagattcaacttaagaatggagacaacaaagacactttaattaaggagcagacggaatatcgtaaagctatccataaaaaatttgcaaacgatgaccgtttcaaaaatatgttttccgcaaaattgattagcgacattttacctgaattcgtaatccataacaacaactattccgcatctgaaaaagaggagaagacccaagttatcaaacttttttcacgtttcgcgacatcttttaaagactactttaagaatcgtgcgaattgtttcagtgcagatgatatttcgtctagttcatgtcaccgtatcgtgaatgacaacgctgagattttcttttctaatgcgttggtgtatcgccgcatcgtaaagtccttgtcgaatgatgatatcaacaaaattagtggtgacatgaaagactccctgaaagaaatgtcattagaggagatttacagctacgaaaaatacggagagttcatcactcaggaaggtatctccttttacaacgatatttgcggcaaagttaatagtttcatgaatctgtattgtcagaagaataaggaaaacaagaatctgtacaagttacaaaagcttcataaacagatcttgtgcatcgccgacacgtcttatgaagtcccgtataaatttgaaagcgacgaagaagtatatcagagtgtgaatggattcttggacaatatctcatcaaaacacattgttgaacgtttgcgcaaaatcggcgacaactataacggatacaacttggataaaatttatatcgtatcaaaattttatgaatcagtatcccaaaagacttaccgtgattgggagactattaatacggcgttagaaatccattacaacaacattctgccgggtaacggtaaatcgaaagcggacaaagtgaagaaggcggttaagaacgatcttcagaagtctatcacggagattaatgagctggtttccaattacaagttgtgctcggatgataacatcaaagctgaaacctatatccatgaaatttctcatattcttaataacttcgaggcacaagaattaaaatataacccagaaattcatctggttgagagcgaacttaaagcttcagaattaaaaaatgttttggacgtaattatgaacgccttccattggtgcagcgtgtttatgacagaggagttagtagataaggataacaacttttatgcagaattggaagagatctatgatgagatctatccagtgatttcactgtataacttagtccgtaattacgtcactcagaagccgtactcaactaaaaagatcaagttaaattttggaattccgacattggcggatggttggagtaagtctaaggaatactcaaataacgctattatcttaatgcgtgacaacctgtattacttgggtattttcaatgccaaaaataagcccgataaaaaaatcattgaagggaatacttcagaaaataagggagattacaaaaaaatgatttataaccttttgccaggcccaaacaaaatgatccccaaggtgtttttgagtagtaagacgggagtagaaacatataagccatcagcgtacattcttgaagggtacaaacaaaataaacacatcaagagcagcaaggactttgacattacattttgtcatgacttaatcgactactttaaaaattgcattgccattcaccctgagtggaaaaattttggtttcgacttcagtgatacctctacctatgaagatatctctggtttttatcgtgaggtagaacttcagggttacaagatcgattggacgtacatttccgagaaagacattgatcttttacaagagaagggtcagctttacttatttcagatctacaataaagacttttcgaaaaaatccacgggcaacgacaaccttcatacaatgtacttaaagaacctgttctctgaagaaaacttgaaagatatcgtgcttaaattgaatggcgaggccgagatttttttccgtaaaagctcgattggcaatcccatcatccacaagaaaggcagcattctggtaaatcgtacctatgaagcggaggaaaaggaccaatttggtaatattcagattgtccgtaagaacatccctgaaaatatctatcaagaattatataaatatttcaacgataagtcggacaaggaacttagcgatgaagccgcgaagttgaaaaatgttgttggtcaccacgaagcagcaacaaacattgtgaaagactatcgctacacttacgataagtactttttacatatgcctattacgattaactttaaggcaaataagacaggttttatcaacgaccgtatcctgcaatatattgcaaaagagaaggacctgcatgtcattgggattgatcgcggtgaacgcaatctgatttacgtgagtgttattgatacctgcggtaatattgttgagcaaaagtcttttaatatcgttaatggttacgactaccaaattaagcttaaacaacaggaaggtgcccgccagatcgcccgtaaggagtggaaggaaatcggaaaaattaaggaaatcaaagagggatatctgagcttggttattcatgaaatctcaaagatggttattaagtacaacgccatcatcgctatggaagacttatcgtatgggtttaaaaagggtcgtttcaaagttgagcgccaggtctaccaaaagtttgaaacgatgcttattaataaattaaactacttggttttcaaagatatctctattaccgagaatggaggtttactgaaaggataccagttaacgtatatccccgataagcttaaaaacgtgggccatcagtgtggctgtattttctatgtgcccgcggcatatacatcaaaaattgacccgacgacgggtttcgttaatatcttcaagttcaaagatctgacagttgatgcaaaacgcgaattcattaagaagttcgatagtattcgctatgactccgagaaaaatttgttttgcttcacttttgactacaataactttattactcagaatacagtcatgagtaaaagctcctggtcggtttacacgtacggggtacgcatcaaacgtcgttttgtgaatggtcgttttagtaatgagtcggatacaattgatattaccaaggatatggagaagactctggaaatgacagacatcaattggcgtgatggacatgatttgcgtcaggacattatcgactatgagattgtgcagcatattttcgaaatttttcgcctgacggtgcaaatgcgtaattccttaagcgaactggaagatcgcgactatgaccgcttaatttctcctgtgctgaatgagaacaacatcttctatgactcagcgaaagccggggacgctttgccaaaggatgcagatgctaacggtgcatattgtattgctctgaaaggcctttacgagatcaaacaaattactgaaaactggaaggaagatggaaagttttcccgtgataaattgaagatctctaataaggactggtttgactttatccaaaataaacgttattta

SEQ ID NO: 140 - protein, 1263 aa, synthetic construct
MNNGTNNFQNFIGISSLQKTLRNALIPTETTQQFIVKNGIIKEDELRGENRQILKDIMDDYYRGFISETLSSIDDIDWTSLFEKMEIQLKNGDNKDTLIKEQTEYRKAIHKKFANDDRFKNMFSAKLISDILPEFVIHNNNYSASEKEEKTQVIKLFSRFATSFKDYFKNRANCFSADDISSSSCHRIVNDNAEIFFSNALVYRRIVKSLSNDDINKISGDMKDSLKEMSLEEIYSYEKYGEFITQEGISFYNDICGKVNSFMNLYCQKNKENKNLYKLQKLHKQILCIADTSYEVPYKFESDEEVYQSVNGFLDNISSKHIVERLRKIGDNYNGYNLDKIYIVSKFYESVSQKTYRDWETINTALEIHYNNILPGNGKSKADKVKKAVKNDLQKSITEINELVSNYKLCSDDNIKAETYIHEISHILNNFEAQELKYNPEIHLVESELKASELKNVLDVIMNAFHWCSVFMTEELVDKDNNFYAELEEIYDEIYPVISLYNLVRNYVTQKPYSTKKIKLNFGIPTLADGWSKSKEYSNNAIILMRDNLYYLGIFNAKNKPDKKIIEGNTSENKGDYKKMIYNLLPGPNKMIPKVFLSSKTGVETYKPSAYILEGYKQNKHIKSSKDFDITFCHDLIDYFKNCIAIHPEWKNFGFDFSDTSTYEDISGFYREVELQGYKIDWTYISEKDIDLLQEKGQLYLFQIYNKDFSKKSTGNDNLHTMYLKNLFSEENLKDIVLKLNGEAEIFFRKSSIGNPIIHKKGSILVNRTYEAEEKDQFGNIQIVRKNIPENIYQELYKYFNDKSDKELSDEAAKLKNVVGHHEAATNIVKDYRYTYDKYFLHMPITINFKANKTGFINDRILQYIAKEKDLHVIGIDRGERNLIYVSVIDTCGNIVEQKSFNIVNGYDYQIKLKQQEGARQIARKEWKEIGKIKEIKEGYLSLVIHEISKMVIKYNAIIAMEDLSYGFKKGRFKVERQVYQKFETMLINKLNYLVFKDISITENGGLLKGYQLTYIPDKLKNVGHQCGCIFYVPAAYTSKIDPTTGFVNIFKFKDLTVDAKREFIKKFDSIRYDSEKNLFCFTFDYNNFITQNTVMSKSSWSVYTYGVRIKRRFVNGRFSNESDTIDITKDMEKTLEMTDINWRDGHDLRQDIIDYEIVQHIFEIFRLTVQMRNSLSELEDRDYDRLISPVLNENNIFYDSAKAGDALPKDADANGAYCIALKGLYEIKQITENWKEDGKFSRDKLKISNKDWFDFIQNKRYL

SEQ ID NO: 141 - DNA, 3789 bp, synthetic construct
  source 1..3789: mol_type = other DNA
atgaataacggtaccaataactttcaaaattttatcgggatctcctcgttgcaaaaaactcttcgtaatgctttaatcccgactgagacaacacagcagttcatcgttaaaaacggcatcattaaagaagatgagctgcgcggcgagaaccgtcagattttaaaggacatcatggacgactattaccgtgggttcatctcagaaacattaagcagcatcgatgatatcgactggacctcactgtttgagaagatggagattcaacttaagaatggagacaacaaagacactttaattaaggagcagacggaatatcgtaaagctatccataaaaaatttgcaaacgatgaccgtttcaaaaatatgttttccgcaaaattgattagcgacattttacctgaattcgtaatccataacaacaactattccgcatctgaaaaagaggagaagacccaagttatcaaacttttttcacgtttcgcgacatcttttaaagactactttaagaatcgtgcgaattgtttcagtgcagatgatatttcgtctagttcatgtcaccgtatcgtgaatgacaacgctgagattttcttttctaatgcgttggtgtatcgccgcatcgtaaagtccttgtcgaatgatgatatcaacaaaattagtggtgacatgaaagactccctgaaagaaatgtcattagaggagatttacagctacgaaaaatacggagagttcatcactcaggaaggtatctccttttacaacgatatttgcggcaaagttaatagtttcatgaatctgtattgtcagaagaataaggaaaacaagaatctgtacaagttacaaaagcttcataaacagatcttgtgcatcgccgacacgtcttatgaagtcccgtataaatttgaaagcgacgaagaagtatatcagagtgtgaatggattcttggacaatatctcatcaaaacacattgttgaacgtttgcgcaaaatcggcgacaactataacggatacaacttggataaaatttatatcgtatcaaaattttatgaatcagtatcccaaaagacttaccgtgattgggagactattaatacggcgttagaaatccattacaacaacattctgccgggtaacggtaaatcgaaagcggacaaagtgaagaaggcggttaagaacgatcttcagaagtctatcacggagattaatgagctggtttccaattacaagttgtgctcggatgataacatcaaagctgaaacctatatccatgaaatttctcatattcttaataacttcgaggcacaagaattaaaatataacccagaaattcatctggttgagagcgaacttaaagcttcagaattaaaaaatgttttggacgtaattatgaacgccttccattggtgcagcgtgtttatgacagaggagttagtagataaggataacaacttttatgcagaattggaagagatctatgatgagatctatccagtgatttcactgtataacttagtccgtaattacgtcactcagaagccgtactcaactaaaaagatcaagttaaattttggaattccgacattggcggatggttggagtaagtctaaggaatactcaaataacgctattatcttaatgcgtgacaacctgtattacttgggtattttcaatgccaaaaataagcccgataaaaaaatcattgaagggaatacttcagaaaataagggagattacaaaaaaatgatttataaccttttgccaggcccaaacaaaatgatccccaaggtgtttttgagtagtaagacgggagtagaaacatataagccatcagcgtacattcttgaagggtacaaacaaaataaacacatcaagagcagcaaggactttgacattacattttgtcatgacttaatcgactactttaaaaattgcattgccattcaccctgagtggaaaaattttggtttcgacttcagtgatacctctacctatgaagatatctctggtttttatcgtgaggtagaacttcagggttacaagatcgattggacgtacatttccgagaaagacattgatcttttacaagagaagggtcagctttacttatttcagatctacaataaagacttttcgaaaaaatccacgggcaacgacaaccttcatacaatgtacttaaagaacctgttctctgaagaaaacttgaaagatatcgtgcttaaattgaatggcgaggccgagatttttttccgtaaaagctcgattaagaatccctggatccacaagaaaggcagcattctggtaaatcgtacctatgaagcggaggaaaaggaccaatttggtaatattcagattgtccgtaagaacatccctgaaaatatctatcaagaattatataaatatttcaacgataagtcggacaaggaacttagcgatgaagccgcgaagttgaaaaatgttgttggtcaccacgaagcagcaacaaacattgtgaaagactatcgctacacttacgataagtactttttacatatgcctattacgattaactttaaggcaaataagacaggttttatcaacgaccgtatcctgcaatatattgcaaaagagaaggacctgcatgtcattgggattgatcgcggtgaacgcaatctgatttacgtgagtgttattgatacctgcggtaatattgttgagcaaaagtcttttaatatcgttaatggttacgactaccaaattaagcttaaacaacaggaaggtgcccgccagatcgcccgtaaggagtggaaggaaatcggaaaaattaaggaaatcaaagagggatatctgagcttggttattcatgaaatctcaaagatggttattaagtacaacgccatcatcgctatggaagacttatcgtatgggtttaaaaagggtcgtttcaaagttgagcgccaggtctaccaaaagtttgaaacgatgcttattaataaattaaactacttggttttcaaagatatctctattaccgagaatggaggtttactgaaaggataccagttaacgtatatccccgataagcttaaaaacgtgggccatcagtgtggctgtattttctatgtgcccgcggcatatacatcaaaaattgacccgacgacgggtttcgttaatatcttcaagttcaaagatctgacagttgatgcaaaacgcgaattcattaagaagttcgatagtattcgctatgactccgagaaaaatttgttttgcttcacttttgactacaataactttattactcagaatacagtcatgagtaaaagctcctggtcggtttacacgtacggggtacgcatcaaacgtcgttttgtgaatggtcgttttagtaatgagtcggatacaattgatattaccaaggatatggagaagactctggaaatgacagacatcaattggcgtgatggacatgatttgcgtcaggacattatcgactatgagattgtgcagcatattttcgaaatttttcgcctgacggtgcaaatgcgtaattccttaagcgaactggaagatcgcgactatgaccgcttaatttctcctgtgctgaatgagaacaacatcttctatgactcagcgaaagccggggacgctttgccaaaggatgcagatgctaacggtgcatattgtattgctctgaaaggcctttacgagatcaaacaaattactgaaaactggaaggaagatggaaagttttcccgtgataaattgaagatctctaataaggactggtttgactttatccaaaataaacgttattta

SEQ ID NO: 142 - protein, 1263 aa, synthetic construct
MNNGTNNFQNFIGISSLQKTLRNALIPTETTQQFIVKNGIIKEDELRGENRQILKDIMDDYYRGFISETLSSIDDIDWTSLFEKMEIQLKNGDNKDTLIKEQTEYRKAIHKKFANDDRFKNMFSAKLISDILPEFVIHNNNYSASEKEEKTQVIKLFSRFATSFKDYFKNRANCFSADDISSSSCHRIVNDNAEIFFSNALVYRRIVKSLSNDDINKISGDMKDSLKEMSLEEIYSYEKYGEFITQEGISFYNDICGKVNSFMNLYCQKNKENKNLYKLQKLHKQILCIADTSYEVPYKFESDEEVYQSVNGFLDNISSKHIVERLRKIGDNYNGYNLDKIYIVSKFYESVSQKTYRDWETINTALEIHYNNILPGNGKSKADKVKKAVKNDLQKSITEINELVSNYKLCSDDNIKAETYIHEISHILNNFEAQELKYNPEIHLVESELKASELKNVLDVIMNAFHWCSVFMTEELVDKDNNFYAELEEIYDEIYPVISLYNLVRNYVTQKPYSTKKIKLNFGIPTLADGWSKSKEYSNNAIILMRDNLYYLGIFNAKNKPDKKIIEGNTSENKGDYKKMIYNLLPGPNKMIPKVFLSSKTGVETYKPSAYILEGYKQNKHIKSSKDFDITFCHDLIDYFKNCIAIHPEWKNFGFDFSDTSTYEDISGFYREVELQGYKIDWTYISEKDIDLLQEKGQLYLFQIYNKDFSKKSTGNDNLHTMYLKNLFSEENLKDIVLKLNGEAEIFFRKSSIKNPWIHKKGSILVNRTYEAEEKDQFGNIQIVRKNIPENIYQELYKYFNDKSDKELSDEAAKLKNVVGHHEAATNIVKDYRYTYDKYFLHMPITINFKANKTGFINDRILQYIAKEKDLHVIGIDRGERNLIYVSVIDTCGNIVEQKSFNIVNGYDYQIKLKQQEGARQIARKEWKEIGKIKEIKEGYLSLVIHEISKMVIKYNAIIAMEDLSYGFKKGRFKVERQVYQKFETMLINKLNYLVFKDISITENGGLLKGYQLTYIPDKLKNVGHQCGCIFYVPAAYTSKIDPTTGFVNIFKFKDLTVDAKREFIKKFDSIRYDSEKNLFCFTFDYNNFITQNTVMSKSSWSVYTYGVRIKRRFVNGRFSNESDTIDITKDMEKTLEMTDINWRDGHDLRQDIIDYEIVQHIFEIFRLTVQMRNSLSELEDRDYDRLISPVLNENNIFYDSAKAGDALPKDADANGAYCIALKGLYEIKQITENWKEDGKFSRDKLKISNKDWFDFIQNKRYL

SEQ ID NO: 143 - DNA, 3789 bp, synthetic construct
  source 1..3789: mol_type = other DNA
atgaataacggtaccaataactttcaaaattttatcgggatctcctcgttgcaaaaaactcttcgtaatgctttaatcccgactgagacaacacagcagttcatcgttaaaaacggcatcattaaagaagatgagctgcgcggcgagaaccgtcagattttaaaggacatcatggacgactattaccgtgggttcatctcagaaacattaagcagcatcgatgatatcgactggacctcactgtttgagaagatggagattcaacttaagaatggagacaacaaagacactttaattaaggagcagacggaatatcgtaaagctatccataaaaaatttgcaaacgatgaccgtttcaaaaatatgttttccgcaaaattgattagcgacattttacctgaattcgtaatccataacaacaactattccgcatctgaaaaagaggagaagacccaagttatcaaacttttttcacgtttcgcgacatcttttaaagactactttaagaatcgtgcgaattgtttcagtgcagatgatatttcgtctagttcatgtcaccgtatcgtgaatgacaacgctgagattttcttttctaatgcgttggtgtatcgccgcatcgtaaagtccttgtcgaatgatgatatcaacaaaattagtggtgacatgaaagactccctgaaagaaatgtcattagaggagatttacagctacgaaaaatacggagagttcatcactcaggaaggtatctccttttacaacgatatttgcggcaaagttaatagtttcatgaatctgtattgtcagaagaataaggaaaacaagaatctgtacaagttacaaaagcttcataaacagatcttgtgcatcgccgacacgtcttatgaagtcccgtataaatttgaaagcgacgaagaagtatatcagagtgtgaatggattcttggacaatatctcatcaaaacacattgttgaacgtttgcgcaaaatcggcgacaactataacggatacaacttggataaaatttatatcgtatcaaaattttatgaatcagtatcccaaaagacttaccgtgattgggagactattaatacggcgttagaaatccattacaacaacattctgccgggtaacggtaaatcgaaagcggacaaagtgaagaaggcggttaagaacgatcttcagaagtctatcacggagattaatgagctggtttccaattacaagttgtgctcggatgataacatcaaagctgaaacctatatccatgaaatttctcatattcttaataacttcgaggcacaagaattaaaatataacccagaaattcatctggttgagagcgaacttaaagcttcagaattaaaaaatgttttggacgtaattatgaacgccttccattggtgcagcgtgtttatgacagaggagttagtagataaggataacaacttttatgcagaattggaagagatctatgatgagatctatccagtgatttcactgtataacttagtccgtaattacgtcactcagaagccgtactcaactaaaaagatcaagttaaattttggaattccgacattggcggatggttggagtaagtctaaggaatactcaaataacgctattatcttaatgcgtgacaacctgtattacttgggtattttcaatgccaaaaataagcccgataaaaaaatcattgaagggaatacttcagaaaataagggagattacaaaaaaatgatttataaccttttgccaggcccaaacaaaatgatccccaaggtgtttttgagtagtaagacgggagtagaaacatataagccatcagcgtacattcttgaagggtacaaacaaaataaacacatcaagagcagcaaggactttgacattacattttgtcatgacttaatcgactactttaaaaattgcattgccattcaccctgagtggaaaaattttggtttcgacttcagtgatacctctacctatgaagatatctctggtttttatcgtgaggtagaacttcagggttacaagatcgattggacgtacatttccgagaaagacattgatcttttacaagagaagggtcagctttacttatttcagatctacaataaagacttttcgaaaaaatccacgggcaacgacaaccttcatacaatgtacttaaagaacctgttctctgaagaaaacttgaaagatatcgtgcttaaattgaatggcgaggccgagatttttttccgtaaaagctcgattaagaatcccaaaatccacaagaaaggcagcattctggtaaatcgtacctatgaagcggaggaaaaggaccaatttggtaatattcagattgtccgtaagaacatccctgaaaatatctatcaagaattatataaatatttcaacgataagtcggacaaggaacttagcgatgaagccgcgaagttgaaaaatgttgttggtcaccacgaagcagcaacaaacattgtgaaagactatcgctacacttacgataagtactttttacatatgcctattacgattaactttaaggcaaataagacaggttttatcaacgaccgtatcctgcaatatattgcaaaagagaaggacctgcatgtcattgggattgatcgcggtgaacgcaatctgatttacgtgagtgttattgatacctgcggtaatattgttgagcaaaagtcttttaatatcgttaatggttacgactaccaaattaagcttaaacaacaggaaggtgcccgccagatcgcccgtaaggagtggaaggaaatcggaaaaattaaggaaatcaaagagggatatctgagcttggttattcatgaaatctcaaagatggttattaagtacaacgccatcatcgctatggaagacttatcgtatgggtttaaaaagggtcgtttcaaagttgagcgccaggtctaccaaaagtttgaaacgatgcttattaataaattaaactacttggttttcaaagatatctctattaccgagaatggaggtttactgaaaggataccagttaacgtatatccccgataagcttaaaaacgtgggccatcagtgtggctgtattttctatgtgcccgcggcatatacatcaaaaattgacccgacgacgggtttcgttaatatcttcaagttcaaagatctgacagttgatgcaaaacgcgaattcattaagaagttcgatagtattcgctatgactccgagaaaaatttgttttgcttcacttttgactacaataactttattactcagaatacagtcatgagtaaaagctcctggtcggtttacacgtacggggtacgcatcaaacgtcgttttgtgaatggtcgttttagtaatgagtcggatacaattgatattaccaaggatatggagaagactctggaaatgacagacatcaattggcgtgatggacatgatttgcgtcaggacattatcgactatgagattgtgcagcatattttcgaaatttttcgcctgacggtgcaaatgcgtaattccttaagcgaactggaagatcgcgactatgaccgcttaatttctcctgtgctgaatgagaacaacatcttctatgactcagcgaaagccggggacgctttgccaaaggatgcagatgctaacggtgcatattgtattgctctgaaaggcctttacgagatcaaacaaattactgaaaactggaaggaagatggaaagttttcccgtgataaattgaagatctctaataaggactggtttgactttatccaaaataaacgttattta

SEQ ID NO: 144 - protein, 1263 aa, synthetic construct
MNNGTNNFQNFIGISSLQKTLRNALIPTETTQQFIVKNGIIKEDELRGENRQILKDIMDDYYRGFISETLSSIDDIDWTSLFEKMEIQLKNGDNKDTLIKEQTEYRKAIHKKFANDDRFKNMFSAKLISDILPEFVIHNNNYSASEKEEKTQVIKLFSRFATSFKDYFKNRANCFSADDISSSSCHRIVNDNAEIFFSNALVYRRIVKSLSNDDINKISGDMKDSLKEMSLEEIYSYEKYGEFITQEGISFYNDICGKVNSFMNLYCQKNKENKNLYKLQKLHKQILCIADTSYEVPYKFESDEEVYQSVNGFLDNISSKHIVERLRKIGDNYNGYNLDKIYIVSKFYESVSQKTYRDWETINTALEIHYNNILPGNGKSKADKVKKAVKNDLQKSITEINELVSNYKLCSDDNIKAETYIHEISHILNNFEAQELKYNPEIHLVESELKASELKNVLDVIMNAFHWCSVFMTEELVDKDNNFYAELEEIYDEIYPVISLYNLVRNYVTQKPYSTKKIKLNFGIPTLADGWSKSKEYSNNAIILMRDNLYYLGIFNAKNKPDKKIIEGNTSENKGDYKKMIYNLLPGPNKMIPKVFLSSKTGVETYKPSAYILEGYKQNKHIKSSKDFDITFCHDLIDYFKNCIAIHPEWKNFGFDFSDTSTYEDISGFYREVELQGYKIDWTYISEKDIDLLQEKGQLYLFQIYNKDFSKKSTGNDNLHTMYLKNLFSEENLKDIVLKLNGEAEIFFRKSSIKNPKIHKKGSILVNRTYEAEEKDQFGNIQIVRKNIPENIYQELYKYFNDKSDKELSDEAAKLKNVVGHHEAATNIVKDYRYTYDKYFLHMPITINFKANKTGFINDRILQYIAKEKDLHVIGIDRGERNLIYVSVIDTCGNIVEQKSFNIVNGYDYQIKLKQQEGARQIARKEWKEIGKIKEIKEGYLSLVIHEISKMVIKYNAIIAMEDLSYGFKKGRFKVERQVYQKFETMLINKLNYLVFKDISITENGGLLKGYQLTYIPDKLKNVGHQCGCIFYVPAAYTSKIDPTTGFVNIFKFKDLTVDAKREFIKKFDSIRYDSEKNLFCFTFDYNNFITQNTVMSKSSWSVYTYGVRIKRRFVNGRFSNESDTIDITKDMEKTLEMTDINWRDGHDLRQDIIDYEIVQHIFEIFRLTVQMRNSLSELEDRDYDRLISPVLNENNIFYDSAKAGDALPKDADANGAYCIALKGLYEIKQITENWKEDGKFSRDKLKISNKDWFDFIQNKRYL

SEQ ID NO: 145 - DNA, 3789 bp, synthetic construct
  source 1..3789: mol_type = other DNA
atgaataacggtaccaataactttcaaaattttatcgggatctcctcgttgcaaaaaactcttcgtaatgctttaatcccgactgagacaacacagcagttcatcgttaaaaacggcatcattaaagaagatgagctgcgcggcgagaaccgtcagattttaaaggacatcatggacgactattaccgtgggttcatctcagaaacattaagcagcatcgatgatatcgactggacctcactgtttgagaagatggagattcaacttaagaatggagacaacaaagacactttaattaaggagcagacggaatatcgtaaagctatccataaaaaatttgcaaacgatgaccgtttcaaaaatatgttttccgcaaaattgattagcgacattttacctgaattcgtaatccataacaacaactattccgcatctgaaaaagaggagaagacccaagttatcaaacttttttcacgtttcgcgacatcttttaaagactactttaagaatcgtgcgaattgtttcagtgcagatgatatttcgtctagttcatgtcaccgtatcgtgaatgacaacgctgagattttcttttctaatgcgttggtgtatcgccgcatcgtaaagtccttgtcgaatgatgatatcaacaaaattagtggtgacatgaaagactccctgaaagaaatgtcattagaggagatttacagctacgaaaaatacggagagttcatcactcaggaaggtatctccttttacaacgatatttgcggcaaagttaatagtttcatgaatctgtattgtcagaagaataaggaaaacaagaatctgtacaagttacaaaagcttcataaacagatcttgtgcatcgccgacacgtcttatgaagtcccgtataaatttgaaagcgacgaagaagtatatcagagtgtgaatggattcttggacaatatctcatcaaaacacattgttgaacgtttgcgcaaaatcggcgacaactataacggatacaacttggataaaatttatatcgtatcaaaattttatgaatcagtatcccaaaagacttaccgtgattgggagactattaatacggcgttagaaatccattacaacaacattctgccgggtaacggtaaatcgaaagcggacaaagtgaagaaggcggttaagaacgatcttcagaagtctatcacggagattaatgagctggtttccaattacaagttgtgctcggatgataacatcaaagctgaaacctatatccatgaaatttctcatattcttaataacttcgaggcacaagaattaaaatataacccagaaattcatctggttgagagcgaacttaaagcttcagaattaaaaaatgttttggacgtaattatgaacgccttccattggtgcagcgtgtttatgacagaggagttagtagataaggataacaacttttatgcagaattggaagagatctatgatgagatctatccagtgatttcactgtataacttagtccgtaattacgtcactcagaagccgtactcaactaaaaagatcaagttaaattttggaattccgacattggcggatggttggagtaagtctaaggaatactcaaataacgctattatcttaatgcgtgacaacctgtattacttgggtattttcaatgccaaaaataagcccgataaaaaaatcattgaagggaatacttcagaaaataagggagattacaaaaaaatgatttataaccttttgccaggcccaaacaaaatgatccccaaggtgtttttgagtagtaagacgggagtagaaacatataagccatcagcgtacattcttgaagggtacaaacaaaataaacacatcaagagcagcaaggactttgacattacattttgtcatgacttaatcgactactttaaaaattgcattgccattcaccctgagtggaaaaattttggtttcgacttcagtgatacctctacctatgaagatatctctggtttttatcgtgaggtagaacttcagggttacaagatcgattggacgtacatttccgagaaagacattgatcttttacaagagaagggtcagctttacttatttcagatctacaataaagacttttcgaaaaaatccacgggcaacgacaaccttcatacaatgtacttaaagaacctgttctctgaagaaaacttgaaagatatcgtgcttaaattgaatggcgaggccgagatttttttccgtaaaagctcgattaagaatcccatcatccacaagaaaggcagcattctggtaaatcgtacctatcgtgcggaggaaaaggaccaatttggtaatattcagattgtccgtaagaacatccctgaaaatatctatcaagaattatataaatatttcaacgataagtcggacaaggaacttagcgatgaagccgcgaagttgaaaaatgttgttggtcaccacgaagcagcaacaaacattgtgaaagactatcgctacacttacgataagtactttttacatatgcctattacgattaactttaaggcaaataagacaggttttatcaacgaccgtatcctgcaatatattgcaaaagagaaggacctgcatgtcattgggattgatcgcggtgaacgcaatctgatttacgtgagtgttattgatacctgcggtaatattgttgagcaaaagtcttttaatatcgttaatggttacgactaccaaattaagcttaaacaacaggaaggtgcccgccagatcgcccgtaaggagtggaaggaaatcggaaaaattaaggaaatcaaagagggatatctgagcttggttattcatgaaatctcaaagatggttattaagtacaacgccatcatcgctatggaagacttatcgtatgggtttaaaaagggtcgtttcaaagttgagcgccaggtctaccaaaagtttgaaacgatgcttattaataaattaaactacttggttttcaaagatatctctattaccgagaatggaggtttactgaaaggataccagttaacgtatatccccgataagcttaaaaacgtgggccatcagtgtggctgtattttctatgtgcccgcggcatatacatcaaaaattgacccgacgacgggtttcgttaatatcttcaagttcaaagatctgacagttgatgcaaaacgcgaattcattaagaagttcgatagtattcgctatgactccgagaaaaatttgttttgcttcacttttgactacaataactttattactcagaatacagtcatgagtaaaagctcctggtcggtttacacgtacggggtacgcatcaaacgtcgttttgtgaatggtcgttttagtaatgagtcggatacaattgatattaccaaggatatggagaagactctggaaatgacagacatcaattggcgtgatggacatgatttgcgtcaggacattatcgactatgagattgtgcagcatattttcgaaatttttcgcctgacggtgcaaatgcgtaattccttaagcgaactggaagatcgcgactatgaccgcttaatttctcctgtgctgaatgagaacaacatcttctatgactcagcgaaagccggggacgctttgccaaaggatgcagatgctaacggtgcatattgtattgctctgaaaggcctttacgagatcaaacaaattactgaaaactggaaggaagatggaaagttttcccgtgataaattgaagatctctaataaggactggtttgactttatccaaaataaacgttattta

SEQ ID NO: 146 - protein, 1263 aa, synthetic construct
MNNGTNNFQNFIGISSLQKTLRNALIPTETTQQFIVKNGIIKEDELRGENRQILKDIMDDYYRGFISETLSSIDDIDWTSLFEKMEIQLKNGDNKDTLIKEQTEYRKAIHKKFANDDRFKNMFSAKLISDILPEFVIHNNNYSASEKEEKTQVIKLFSRFATSFKDYFKNRANCFSADDISSSSCHRIVNDNAEIFFSNALVYRRIVKSLSNDDINKISGDMKDSLKEMSLEEIYSYEKYGEFITQEGISFYNDICGKVNSFMNLYCQKNKENKNLYKLQKLHKQILCIADTSYEVPYKFESDEEVYQSVNGFLDNISSKHIVERLRKIGDNYNGYNLDKIYIVSKFYESVSQKTYRDWETINTALEIHYNNILPGNGKSKADKVKKAVKNDLQKSITEINELVSNYKLCSDDNIKAETYIHEISHILNNFEAQELKYNPEIHLVESELKASELKNVLDVIMNAFHWCSVFMTEELVDKDNNFYAELEEIYDEIYPVISLYNLVRNYVTQKPYSTKKIKLNFGIPTLADGWSKSKEYSNNAIILMRDNLYYLGIFNAKNKPDKKIIEGNTSENKGDYKKMIYNLLPGPNKMIPKVFLSSKTGVETYKPSAYILEGYKQNKHIKSSKDFDITFCHDLIDYFKNCIAIHPEWKNFGFDFSDTSTYEDISGFYREVELQGYKIDWTYISEKDIDLLQEKGQLYLFQIYNKDFSKKSTGNDNLHTMYLKNLFSEENLKDIVLKLNGEAEIFFRKSSIKNPIIHKKGSILVNRTYRAEEKDQFGNIQIVRKNIPENIYQELYKYFNDKSDKELSDEAAKLKNVVGHHEAATNIVKDYRYTYDKYFLHMPITINFKANKTGFINDRILQYIAKEKDLHVIGIDRGERNLIYVSVIDTCGNIVEQKSFNIVNGYDYQIKLKQQEGARQIARKEWKEIGKIKEIKEGYLSLVIHEISKMVIKYNAIIAMEDLSYGFKKGRFKVERQVYQKFETMLINKLNYLVFKDISITENGGLLKGYQLTYIPDKLKNVGHQCGCIFYVPAAYTSKIDPTTGFVNIFKFKDLTVDAKREFIKKFDSIRYDSEKNLFCFTFDYNNFITQNTVMSKSSWSVYTYGVRIKRRFVNGRFSNESDTIDITKDMEKTLEMTDINWRDGHDLRQDIIDYEIVQHIFEIFRLTVQMRNSLSELEDRDYDRLISPVLNENNIFYDSAKAGDALPKDADANGAYCIALKGLYEIKQITENWKEDGKFSRDKLKISNKDWFDFIQNKRYL

SEQ ID NO: 147 - DNA, 3789 bp, synthetic construct
  source 1..3789: mol_type = other DNA
atgaataacggtaccaataactttcaaaattttatcgggatctcctcgttgcaaaaaactcttcgtaatgctttaatcccgactgagacaacacagcagttcatcgttaaaaacggcatcattaaagaagatgagctgcgcggcgagaaccgtcagattttaaaggacatcatggacgactattaccgtgggttcatctcagaaacattaagcagcatcgatgatatcgactggacctcactgtttgagaagatggagattcaacttaagaatggagacaacaaagacactttaattaaggagcagacggaatatcgtaaagctatccataaaaaatttgcaaacgatgaccgtttcaaaaatatgttttccgcaaaattgattagcgacattttacctgaattcgtaatccataacaacaactattccgcatctgaaaaagaggagaagacccaagttatcaaacttttttcacgtttcgcgacatcttttaaagactactttaagaatcgtgcgaattgtttcagtgcagatgatatttcgtctagttcatgtcaccgtatcgtgaatgacaacgctgagattttcttttctaatgcgttggtgtatcgccgcatcgtaaagtccttgtcgaatgatgatatcaacaaaattagtggtgacatgaaagactccctgaaagaaatgtcattagaggagatttacagctacgaaaaatacggagagttcatcactcaggaaggtatctccttttacaacgatatttgcggcaaagttaatagtttcatgaatctgtattgtcagaagaataaggaaaacaagaatctgtacaagttacaaaagcttcataaacagatcttgtgcatcgccgacacgtcttatgaagtcccgtataaatttgaaagcgacgaagaagtatatcagagtgtgaatggattcttggacaatatctcatcaaaacacattgttgaacgtttgcgcaaaatcggcgacaactataacggatacaacttggataaaatttatatcgtatcaaaattttatgaatcagtatcccaaaagacttaccgtgattgggagactattaatacggcgttagaaatccattacaacaacattctgccgggtaacggtaaatcgaaagcggacaaagtgaagaaggcggttaagaacgatcttcagaagtctatcacggagattaatgagctggtttccaattacaagttgtgctcggatgataacatcaaagctgaaacctatatccatgaaatttctcatattcttaataacttcgaggcacaagaattaaaatataacccagaaattcatctggttgagagcgaacttaaagcttcagaattaaaaaatgttttggacgtaattatgaacgccttccattggtgcagcgtgtttatgacagaggagttagtagataaggataacaacttttatgcagaattggaagagatctatgatgagatctatccagtgatttcactgtataacttagtccgtaattacgtcactcagaagccgtactcaactaaaaagatcaagttaaattttggaattccgacattggcggatggttggagtaagtctaaggaatactcaaataacgctattatcttaatgcgtgacaacctgtattacttgggtattttcaatgccaaaaataagcccgataaaaaaatcattgaagggaatacttcagaaaataagggagattacaaaaaaatgatttataaccttttgccaggcccaaacaaaatgatccccaaggtgtttttgagtagtaagacgggagtagaaacatataagccatcagcgtacattcttgaagggtacaaacaaaataaacacatcaagagcagcaaggactttgacattacattttgtcatgacttaatcgactactttaaaaattgcattgccattcaccctgagtggaaaaattttggtttcgacttcagtgatacctctacctatgaagatatctctggtttttatcgtgaggtagaacttcagggttacaagatcgattggacgtacatttccgagaaagacattgatcttttacaagagaagggtcagctttacttatttcagatctacaataaagacttttcgaaaaaatccacgggcaacgacaaccttcatacaatgtacttaaagaacctgttctctgaagaaaacttgaaagatatcgtgcttaaattgaatggcgaggccgagatttttttccgtaaaagctcgattaagaatcccatcatccacaagaaaggcagcattctggtaaatcgtacctatgaagcggaggaaaaggaccaatttggtaatattcagattgtccgtaaggcgatccctgaaaatatctatcaagaattatataaatatttcaacgataagtcggacaaggaacttagcgatgaagccgcgaagttgaaaaatgttgttggtcaccacgaagcagcaacaaacattgtgaaagactatcgctacacttacgataagtactttttacatatgcctattacgattaactttaaggcaaataagacaggttttatcaacgaccgtatcctgcaatatattgcaaaagagaaggacctgcatgtcattgggattgatcgcggtgaacgcaatctgatttacgtgagtgttattgatacctgcggtaatattgttgagcaaaagtcttttaatatcgttaatggttacgactaccaaattaagcttaaacaacaggaaggtgcccgccagatcgcccgtaaggagtggaaggaaatcggaaaaattaaggaaatcaaagagggatatctgagcttggttattcatgaaatctcaaagatggttattaagtacaacgccatcatcgctatggaagacttatcgtatgggtttaaaaagggtcgtttcaaagttgagcgccaggtctaccaaaagtttgaaacgatgcttattaataaattaaactacttggttttcaaagatatctctattaccgagaatggaggtttactgaaaggataccagttaacgtatatccccgataagcttaaaaacgtgggccatcagtgtggctgtattttctatgtgcccgcggcatatacatcaaaaattgacccgacgacgggtttcgttaatatcttcaagttcaaagatctgacagttgatgcaaaacgcgaattcattaagaagttcgatagtattcgctatgactccgagaaaaatttgttttgcttcacttttgactacaataactttattactcagaatacagtcatgagtaaaagctcctggtcggtttacacgtacggggtacgcatcaaacgtcgttttgtgaatggtcgttttagtaatgagtcggatacaattgatattaccaaggatatggagaagactctggaaatgacagacatcaattggcgtgatggacatgatttgcgtcaggacattatcgactatgagattgtgcagcatattttcgaaatttttcgcctgacggtgcaaatgcgtaattccttaagcgaactggaagatcgcgactatgaccgcttaatttctcctgtgctgaatgagaacaacatcttctatgactcagcgaaagccggggacgctttgccaaaggatgcagatgctaacggtgcatattgtattgctctgaaaggcctttacgagatcaaacaaattactgaaaactggaaggaagatggaaagttttcccgtgataaattgaagatctctaataaggactggtttgactttatccaaaataaacgttattta

SEQ ID NO: 148 - protein, 1263 aa, synthetic construct
MNNGTNNFQNFIGISSLQKTLRNALIPTETTQQFIVKNGIIKEDELRGENRQILKDIMDDYYRGFISETLSSIDDIDWTSLFEKMEIQLKNGDNKDTLIKEQTEYRKAIHKKFANDDRFKNMFSAKLISDILPEFVIHNNNYSASEKEEKTQVIKLFSRFATSFKDYFKNRANCFSADDISSSSCHRIVNDNAEIFFSNALVYRRIVKSLSNDDINKISGDMKDSLKEMSLEEIYSYEKYGEFITQEGISFYNDICGKVNSFMNLYCQKNKENKNLYKLQKLHKQILCIADTSYEVPYKFESDEEVYQSVNGFLDNISSKHIVERLRKIGDNYNGYNLDKIYIVSKFYESVSQKTYRDWETINTALEIHYNNILPGNGKSKADKVKKAVKNDLQKSITEINELVSNYKLCSDDNIKAETYIHEISHILNNFEAQELKYNPEIHLVESELKASELKNVLDVIMNAFHWCSVFMTEELVDKDNNFYAELEEIYDEIYPVISLYNLVRNYVTQKPYSTKKIKLNFGIPTLADGWSKSKEYSNNAIILMRDNLYYLGIFNAKNKPDKKIIEGNTSENKGDYKKMIYNLLPGPNKMIPKVFLSSKTGVETYKPSAYILEGYKQNKHIKSSKDFDITFCHDLIDYFKNCIAIHPEWKNFGFDFSDTSTYEDISGFYREVELQGYKIDWTYISEKDIDLLQEKGQLYLFQIYNKDFSKKSTGNDNLHTMYLKNLFSEENLKDIVLKLNGEAEIFFRKSSIKNPIIHKKGSILVNRTYEAEEKDQFGNIQIVRKAIPENIYQELYKYFNDKSDKELSDEAAKLKNVVGHHEAATNIVKDYRYTYDKYFLHMPITINFKANKTGFINDRILQYIAKEKDLHVIGIDRGERNLIYVSVIDTCGNIVEQKSFNIVNGYDYQIKLKQQEGARQIARKEWKEIGKIKEIKEGYLSLVIHEISKMVIKYNAIIAMEDLSYGFKKGRFKVERQVYQKFETMLINKLNYLVFKDISITENGGLLKGYQLTYIPDKLKNVGHQCGCIFYVPAAYTSKIDPTTGFVNIFKFKDLTVDAKREFIKKFDSIRYDSEKNLFCFTFDYNNFITQNTVMSKSSWSVYTYGVRIKRRFVNGRFSNESDTIDITKDMEKTLEMTDINWRDGHDLRQDIIDYEIVQHIFEIFRLTVQMRNSLSELEDRDYDRLISPVLNENNIFYDSAKAGDALPKDADANGAYCIALKGLYEIKQITENWKEDGKFSRDKLKISNKDWFDFIQNKRYL

SEQ ID NO: 149 - DNA, 3789 bp, synthetic construct
  source 1..3789: mol_type = other DNA
atgaataacggtaccaataactttcaaaattttatcgggatctcctcgttgcaaaaaactcttcgtaatgctttaatcccgactgagacaacacagcagttcatcgttaaaaacggcatcattaaagaagatgagctgcgcggcgagaaccgtcagattttaaaggacatcatggacgactattaccgtgggttcatctcagaaacattaagcagcatcgatgatatcgactggacctcactgtttgagaagatggagattcaacttaagaatggagacaacaaagacactttaattaaggagcagacggaatatcgtaaagctatccataaaaaatttgcaaacgatgaccgtttcaaaaatatgttttccgcaaaattgattagcgacattttacctgaattcgtaatccataacaacaactattccgcatctgaaaaagaggagaagacccaagttatcaaacttttttcacgtttcgcgacatcttttaaagactactttaagaatcgtgcgaattgtttcagtgcagatgatatttcgtctagttcatgtcaccgtatcgtgaatgacaacgctgagattttcttttctaatgcgttggtgtatcgccgcatcgtaaagtccttgtcgaatgatgatatcaacaaaattagtggtgacatgaaagactccctgaaagaaatgtcattagaggagatttacagctacgaaaaatacggagagttcatcactcaggaaggtatctccttttacaacgatatttgcggcaaagttaatagtttcatgaatctgtattgtcagaagaataaggaaaacaagaatctgtacaagttacaaaagcttcataaacagatcttgtgcatcgccgacacgtcttatgaagtcccgtataaatttgaaagcgacgaagaagtatatcagagtgtgaatggattcttggacaatatctcatcaaaacacattgttgaacgtttgcgcaaaatcggcgacaactataacggatacaacttggataaaatttatatcgtatcaaaattttatgaatcagtatcccaaaagacttaccgtgattgggagactattaatacggcgttagaaatccattacaacaacattctgccgggtaacggtaaatcgaaagcggacaaagtgaagaaggcggttaagaacgatcttcagaagtctatcacggagattaatgagctggtttccaattacaagttgtgctcggatgataacatcaaagctgaaacctatatccatgaaatttctcatattcttaataacttcgaggcacaagaattaaaatataacccagaaattcatctggttgagagcgaacttaaagcttcagaattaaaaaatgttttggacgtaattatgaacgccttccattggtgcagcgtgtttatgacagaggagttagtagataaggataacaacttttatgcagaattggaagagatctatgatgagatctatccagtgatttcactgtataacttagtccgtaattacgtcactcagaagccgtactcaactaaaaagatcaagttaaattttggaattccgacattggcggatggttggagtaagtctaaggaatactcaaataacgctattatcttaatgcgtgacaacctgtattacttgggtattttcaatgccaaaaataagcccgataaaaaaatcattgaagggaatacttcagaaaataagggagattacaaaaaaatgatttataaccttttgccaggcccaaacaaaatgatccccaaggtgtttttgagtagtaagacgggagtagaaacatataagccatcagcgtacattcttgaagggtacaaacaaaataaacacatcaagagcagcaaggactttgacattacattttgtcatgacttaatcgactactttaaaaattgcattgccattcaccctgagtggaaaaattttggtttcgacttcagtgatacctctacctatgaagatatctctggtttttatcgtgaggtagaacttcagggttacaagatcgattggacgtacatttccgagaaagacattgatcttttacaagagaagggtcagctttacttatttcagatctacaataaagacttttcgaaaaaatccacgggcaacgacaaccttcatacaatgtacttaaagaacctgttctctgaagaaaacttgaaagatatcgtgcttaaattgaatggcgaggccgagatttttttccgtaaaagctcgattaagaatcccatcatccacaagaaaggcagcattctggtaaatcgtacctatgaagcggaggaaaaggaccaatttggtaatattcagattgtccgtaagaacatccctgaaaatatctatcaagaattatataaatatttcaacgataagtcggacaaggaacttagcgatgaagccgcgaagttgaaaaatgttgttggtcaccacgaagcacgtacaaacattgtgaaagactatcgctacacttacgataagtactttttacatatgcctattacgattaactttaaggcaaataagacaggttttatcaacgaccgtatcctgcaatatattgcaaaagagaaggacctgcatgtcattgggattgatcgcggtgaacgcaatctgatttacgtgagtgttattgatacctgcggtaatattgttgagcaaaagtcttttaatatcgttaatggttacgactaccaaattaagcttaaacaacaggaaggtgcccgccagatcgcccgtaaggagtggaaggaaatcggaaaaattaaggaaatcaaagagggatatctgagcttggttattcatgaaatctcaaagatggttattaagtacaacgccatcatcgctatggaagacttatcgtatgggtttaaaaagggtcgtttcaaagttgagcgccaggtctaccaaaagtttgaaacgatgcttattaataaattaaactacttggttttcaaagatatctctattaccgagaatggaggtttactgaaaggataccagttaacgtatatccccgataagcttaaaaacgtgggccatcagtgtggctgtattttctatgtgcccgcggcatatacatcaaaaattgacccgacgacgggtttcgttaatatcttcaagttcaaagatctgacagttgatgcaaaacgcgaattcattaagaagttcgatagtattcgctatgactccgagaaaaatttgttttgcttcacttttgactacaataactttattactcagaatacagtcatgagtaaaagctcctggtcggtttacacgtacggggtacgcatcaaacgtcgttttgtgaatggtcgttttagtaatgagtcggatacaattgatattaccaaggatatggagaagactctggaaatgacagacatcaattggcgtgatggacatgatttgcgtcaggacattatcgactatgagattgtgcagcatattttcgaaatttttcgcctgacggtgcaaatgcgtaattccttaagcgaactggaagatcgcgactatgaccgcttaatttctcctgtgctgaatgagaacaacatcttctatgactcagcgaaagccggggacgctttgccaaaggatgcagatgctaacggtgcatattgtattgctctgaaaggcctttacgagatcaaacaaattactgaaaactggaaggaagatggaaagttttcccgtgataaattgaagatctctaataaggactggtttgactttatccaaaataaacgttattta

SEQ ID NO: 150 - protein, 1263 aa, synthetic construct
MNNGTNNFQNFIGISSLQKTLRNALIPTETTQQFIVKNGIIKEDELRGENRQILKDIMDDYYRGFISETLSSIDDIDWTSLFEKMEIQLKNGDNKDTLIKEQTEYRKAIHKKFANDDRFKNMFSAKLISDILPEFVIHNNNYSASEKEEKTQVIKLFSRFATSFKDYFKNRANCFSADDISSSSCHRIVNDNAEIFFSNALVYRRIVKSLSNDDINKISGDMKDSLKEMSLEEIYSYEKYGEFITQEGISFYNDICGKVNSFMNLYCQKNKENKNLYKLQKLHKQILCIADTSYEVPYKFESDEEVYQSVNGFLDNISSKHIVERLRKIGDNYNGYNLDKIYIVSKFYESVSQKTYRDWETINTALEIHYNNILPGNGKSKADKVKKAVKNDLQKSITEINELVSNYKLCSDDNIKAETYIHEISHILNNFEAQELKYNPEIHLVESELKASELKNVLDVIMNAFHWCSVFMTEELVDKDNNFYAELEEIYDEIYPVISLYNLVRNYVTQKPYSTKKIKLNFGIPTLADGWSKSKEYSNNAIILMRDNLYYLGIFNAKNKPDKKIIEGNTSENKGDYKKMIYNLLPGPNKMIPKVFLSSKTGVETYKPSAYILEGYKQNKHIKSSKDFDITFCHDLIDYFKNCIAIHPEWKNFGFDFSDTSTYEDISGFYREVELQGYKIDWTYISEKDIDLLQEKGQLYLFQIYNKDFSKKSTGNDNLHTMYLKNLFSEENLKDIVLKLNGEAEIFFRKSSIKNPIIHKKGSILVNRTYEAEEKDQFGNIQIVRKNIPENIYQELYKYFNDKSDKELSDEAAKLKNVVGHHEARTNIVKDYRYTYDKYFLHMPITINFKANKTGFINDRILQYIAKEKDLHVIGIDRGERNLIYVSVIDTCGNIVEQKSFNIVNGYDYQIKLKQQEGARQIARKEWKEIGKIKEIKEGYLSLVIHEISKMVIKYNAIIAMEDLSYGFKKGRFKVERQVYQKFETMLINKLNYLVFKDISITENGGLLKGYQLTYIPDKLKNVGHQCGCIFYVPAAYTSKIDPTTGFVNIFKFKDLTVDAKREFIKKFDSIRYDSEKNLFCFTFDYNNFITQNTVMSKSSWSVYTYGVRIKRRFVNGRFSNESDTIDITKDMEKTLEMTDINWRDGHDLRQDIIDYEIVQHIFEIFRLTVQMRNSLSELEDRDYDRLISPVLNENNIFYDSAKAGDALPKDADANGAYCIALKGLYEIKQITENWKEDGKFSRDKLKISNKDWFDFIQNKRYL

SEQ ID NO: 151 - DNA, 3789 bp, synthetic construct
  source 1..3789: mol_type = other DNA
atgaataacggtaccaataactttcaaaattttatcgggatctcctcgttgcaaaaaactcttcgtaatgctttaatcccgactgagacaacacagcagttcatcgttaaaaacggcatcattaaagaagatgagctgcgcggcgagaaccgtcagattttaaaggacatcatggacgactattaccgtgggttcatctcagaaacattaagcagcatcgatgatatcgactggacctcactgtttgagaagatggagattcaacttaagaatggagacaacaaagacactttaattaaggagcagacggaatatcgtaaagctatccataaaaaatttgcaaacgatgaccgtttcaaaaatatgttttccgcaaaattgattagcgacattttacctgaattcgtaatccataacaacaactattccgcatctgaaaaagaggagaagacccaagttatcaaacttttttcacgtttcgcgacatcttttaaagactactttaagaatcgtgcgaattgtttcagtgcagatgatatttcgtctagttcatgtcaccgtatcgtgaatgacaacgctgagattttcttttctaatgcgttggtgtatcgccgcatcgtaaagtccttgtcgaatgatgatatcaacaaaattagtggtgacatgaaagactccctgaaagaaatgtcattagaggagatttacagctacgaaaaatacggagagttcatcactcaggaaggtatctccttttacaacgatatttgcggcaaagttaatagtttcatgaatctgtattgtcagaagaataaggaaaacaagaatctgtacaagttacaaaagcttcataaacagatcttgtgcatcgccgacacgtcttatgaagtcccgtataaatttgaaagcgacgaagaagtatatcagagtgtgaatggattcttggacaatatctcatcaaaacacattgttgaacgtttgcgcaaaatcggcgacaactataacggatacaacttggataaaatttatatcgtatcaaaattttatgaatcagtatcccaaaagacttaccgtgattgggagactattaatacggcgttagaaatccattacaacaacattctgccgggtaacggtaaatcgaaagcggacaaagtgaagaaggcggttaagaacgatcttcagaagtctatcacggagattaatgagctggtttccaattacaagttgtgctcggatgataacatcaaagctgaaacctatatccatgaaatttctcatattcttaataacttcgaggcacaagaattaaaatataacccagaaattcatctggttgagagcgaacttaaagcttcagaattaaaaaatgttttggacgtaattatgaacgccttccattggtgcagcgtgtttatgacagaggagttagtagataaggataacaacttttatgcagaattggaagagatctatgatgagatctatccagtgatttcactgtataacttagtccgtaattacgtcactcagaagccgtactcaactaaaaagatcaagttaaattttggaattccgacattggcggatggttggagtaagtctaaggaatactcaaataacgctattatcttaatgcgtgacaacctgtattacttgggtattttcaatgccaaaaataagcccgataaaaaaatcattgaagggaatacttcagaaaataagggagattacaaaaaaatgatttataaccttttgccaggcccaaacaaaatgatccccaaggtgtttttgagtagtaagacgggagtagaaacatataagccatcagcgtacattcttgaagggtacaaacaaaataaacacatcaagagcagcaaggactttgacattacattttgtcatgacttaatcgactactttaaaaattgcattgccattcaccctgagtggaaaaattttggtttcgacttcagtgatacctctacctatgaagatatctctggtttttatcgtgaggtagaacttcagggttacaagatcgattggacgtacatttccgagaaagacattgatcttttacaagagaagggtcagctttacttatttcagatctacaataaagacttttcgaaaaaatccacgggcaacgacaaccttcatacaatgtacttaaagaacctgttctctgaagaaaacttgaaagatatcgtgcttaaattgaatggcgaggccgagatttttttccgtaaaagctcgattaagaatcccatcatccacaagaaaggcagcattctggtaaatcgtacctatgaagcggaggaaaaggaccaatttggtaatattcagattgtccgtaagaacatccctgaaaatatctatcaagaattatataaatatttcaacgataagtcggacaaggaacttagcgatgaagccgcgaagttgaaaaatgttgttggtcaccacgaagcagcaaaaaacattgtgaaagactatcgctacacttacgataagtactttttacatatgcctattacgattaactttaaggcaaataagacaggttttatcaacgaccgtatcctgcaatatattgcaaaagagaaggacctgcatgtcattgggattgatcgcggtgaacgcaatctgatttacgtgagtgttattgatacctgcggtaatattgttgagcaaaagtcttttaatatcgttaatggttacgactaccaaattaagcttaaacaacaggaaggtgcccgccagatcgcccgtaaggagtggaaggaaatcggaaaaattaaggaaatcaaagagggatatctgagcttggttattcatgaaatctcaaagatggttattaagtacaacgccatcatcgctatggaagacttatcgtatgggtttaaaaagggtcgtttcaaagttgagcgccaggtctaccaaaagtttgaaacgatgcttattaataaattaaactacttggttttcaaagatatctctattaccgagaatggaggtttactgaaaggataccagttaacgtatatccccgataagcttaaaaacgtgggccatcagtgtggctgtattttctatgtgcccgcggcatatacatcaaaaattgacccgacgacgggtttcgttaatatcttcaagttcaaagatctgacagttgatgcaaaacgcgaattcattaagaagttcgatagtattcgctatgactccgagaaaaatttgttttgcttcacttttgactacaataactttattactcagaatacagtcatgagtaaaagctcctggtcggtttacacgtacggggtacgcatcaaacgtcgttttgtgaatggtcgttttagtaatgagtcggatacaattgatattaccaaggatatggagaagactctggaaatgacagacatcaattggcgtgatggacatgatttgcgtcaggacattatcgactatgagattgtgcagcatattttcgaaatttttcgcctgacggtgcaaatgcgtaattccttaagcgaactggaagatcgcgactatgaccgcttaatttctcctgtgctgaatgagaacaacatcttctatgactcagcgaaagccggggacgctttgccaaaggatgcagatgctaacggtgcatattgtattgctctgaaaggcctttacgagatcaaacaaattactgaaaactggaaggaagatggaaagttttcccgtgataaattgaagatctctaataaggactggtttgactttatccaaaataaacgttattta

SEQ ID NO: 152 - protein, 1263 aa, synthetic construct
MNNGTNNFQNFIGISSLQKTLRNALIPTETTQQFIVKNGIIKEDELRGENRQILKDIMDDYYRGFISETLSSIDDIDWTSLFEKMEIQLKNGDNKDTLIKEQTEYRKAIHKKFANDDRFKNMFSAKLISDILPEFVIHNNNYSASEKEEKTQVIKLFSRFATSFKDYFKNRANCFSADDISSSSCHRIVNDNAEIFFSNALVYRRIVKSLSNDDINKISGDMKDSLKEMSLEEIYSYEKYGEFITQEGISFYNDICGKVNSFMNLYCQKNKENKNLYKLQKLHKQILCIADTSYEVPYKFESDEEVYQSVNGFLDNISSKHIVERLRKIGDNYNGYNLDKIYIVSKFYESVSQKTYRDWETINTALEIHYNNILPGNGKSKADKVKKAVKNDLQKSITEINELVSNYKLCSDDNIKAETYIHEISHILNNFEAQELKYNPEIHLVESELKASELKNVLDVIMNAFHWCSVFMTEELVDKDNNFYAELEEIYDEIYPVISLYNLVRNYVTQKPYSTKKIKLNFGIPTLADGWSKSKEYSNNAIILMRDNLYYLGIFNAKNKPDKKIIEGNTSENKGDYKKMIYNLLPGPNKMIPKVFLSSKTGVETYKPSAYILEGYKQNKHIKSSKDFDITFCHDLIDYFKNCIAIHPEWKNFGFDFSDTSTYEDISGFYREVELQGYKIDWTYISEKDIDLLQEKGQLYLFQIYNKDFSKKSTGNDNLHTMYLKNLFSEENLKDIVLKLNGEAEIFFRKSSIKNPIIHKKGSILVNRTYEAEEKDQFGNIQIVRKNIPENIYQELYKYFNDKSDKELSDEAAKLKNVVGHHEAAKNIVKDYRYTYDKYFLHMPITINFKANKTGFINDRILQYIAKEKDLHVIGIDRGERNLIYVSVIDTCGNIVEQKSFNIVNGYDYQIKLKQQEGARQIARKEWKEIGKIKEIKEGYLSLVIHEISKMVIKYNAIIAMEDLSYGFKKGRFKVERQVYQKFETMLINKLNYLVFKDISITENGGLLKGYQLTYIPDKLKNVGHQCGCIFYVPAAYTSKIDPTTGFVNIFKFKDLTVDAKREFIKKFDSIRYDSEKNLFCFTFDYNNFITQNTVMSKSSWSVYTYGVRIKRRFVNGRFSNESDTIDITKDMEKTLEMTDINWRDGHDLRQDIIDYEIVQHIFEIFRLTVQMRNSLSELEDRDYDRLISPVLNENNIFYDSAKAGDALPKDADANGAYCIALKGLYEIKQITENWKEDGKFSRDKLKISNKDWFDFIQNKRYL

SEQ ID NO: 153 - DNA, 3789 bp, synthetic construct
  source 1..3789: mol_type = other DNA
atgaataacggtaccaataactttcaaaattttatcgggatctcctcgttgcaaaaaactcttcgtaatgctttaatcccgactgagacaacacagcagttcatcgttaaaaacggcatcattaaagaagatgagctgcgcggcgagaaccgtcagattttaaaggacatcatggacgactattaccgtgggttcatctcagaaacattaagcagcatcgatgatatcgactggacctcactgtttgagaagatggagattcaacttaagaatggagacaacaaagacactttaattaaggagcagacggaatatcgtaaagctatccataaaaaatttgcaaacgatgaccgtttcaaaaatatgttttccgcaaaattgattagcgacattttacctgaattcgtaatccataacaacaactattccgcatctgaaaaagaggagaagacccaagttatcaaacttttttcacgtttcgcgacatcttttaaagactactttaagaatcgtgcgaattgtttcagtgcagatgatatttcgtctagttcatgtcaccgtatcgtgaatgacaacgctgagattttcttttctaatgcgttggtgtatcgccgcatcgtaaagtccttgtcgaatgatgatatcaacaaaattagtggtgacatgaaagactccctgaaagaaatgtcattagaggagatttacagctacgaaaaatacggagagttcatcactcaggaaggtatctccttttacaacgatatttgcggcaaagttaatagtttcatgaatctgtattgtcagaagaataaggaaaacaagaatctgtacaagttacaaaagcttcataaacagatcttgtgcatcgccgacacgtcttatgaagtcccgtataaatttgaaagcgacgaagaagtatatcagagtgtgaatggattcttggacaatatctcatcaaaacacattgttgaacgtttgcgcaaaatcggcgacaactataacggatacaacttggataaaatttatatcgtatcaaaattttatgaatcagtatcccaaaagacttaccgtgattgggagactattaatacggcgttagaaatccattacaacaacattctgccgggtaacggtaaatcgaaagcggacaaagtgaagaaggcggttaagaacgatcttcagaagtctatcacggagattaatgagctggtttccaattacaagttgtgctcggatgataacatcaaagctgaaacctatatccatgaaatttctcatattcttaataacttcgaggcacaagaattaaaatataacccagaaattcatctggttgagagcgaacttaaagcttcagaattaaaaaatgttttggacgtaattatgaacgccttccattggtgcagcgtgtttatgacagaggagttagtagataaggataacaacttttatgcagaattggaagagatctatgatgagatctatccagtgatttcactgtataacttagtccgtaattacgtcactcagaagccgtactcaactaaaaagatcaagttaaattttggaattccgacattggcggatggttggagtaagtctaaggaatactcaaataacgctattatcttaatgcgtgacaacctgtattacttgggtattttcaatgccaaaaataagcccgataaaaaaatcattgaagggaatacttcagaaaataagggagattacaaaaaaatgatttataaccttttgccaggcccaaacaaaatgatccccaaggtgtttttgagtagtaagacgggagtagaaacatataagccatcagcgtacattcttgaagggtacaaacaaaataaacacatcaagagcagcaaggactttgacattacattttgtcatgacttaatcgactactttaaaaattgcattgccattcaccctgagtggaaaaattttggtttcgacttcagtgatacctctacctatgaagatatctctggtttttatcgtgaggtagaacttcagggttacaagatcgattggacgtacatttccgagaaagacattgatcttttacaagagaagggtcagctttacttatttcagatctacaataaagacttttcgaaaaaatccacgggcaacgacaaccttcatacaatgtacttaaagaacctgttctctgaagaaaacttgaaagatatcgtgcttaaattgaatggcgaggccgagatttttttccgtaaaagctcgattaagaatcccatcatccacaagaaaggcagcattctggtaaatcgtacctatgaagcggaggaaaaggaccaatttggtaatattcagattgtccgtaagaacatccctgaaaatatctatcaagaattatataaatatttcaacgataagtcggacaaggaacttagcgatgaagccgcgaagttgaaaaatgttgttggtcaccacgaagcagcatttaacattgtgaaagactatcgctacacttacgataagtactttttacatatgcctattacgattaactttaaggcaaataagacaggttttatcaacgaccgtatcctgcaatatattgcaaaagagaaggacctgcatgtcattgggattgatcgcggtgaacgcaatctgatttacgtgagtgttattgatacctgcggtaatattgttgagcaaaagtcttttaatatcgttaatggttacgactaccaaattaagcttaaacaacaggaaggtgcccgccagatcgcccgtaaggagtggaaggaaatcggaaaaattaaggaaatcaaagagggatatctgagcttggttattcatgaaatctcaaagatggttattaagtacaacgccatcatcgctatggaagacttatcgtatgggtttaaaaagggtcgtttcaaagttgagcgccaggtctaccaaaagtttgaaacgatgcttattaataaattaaactacttggttttcaaagatatctctattaccgagaatggaggtttactgaaaggataccagttaacgtatatccccgataagcttaaaaacgtgggccatcagtgtggctgtattttctatgtgcccgcggcatatacatcaaaaattgacccgacgacgggtttcgttaatatcttcaagttcaaagatctgacagttgatgcaaaacgcgaattcattaagaagttcgatagtattcgctatgactccgagaaaaatttgttttgcttcacttttgactacaataactttattactcagaatacagtcatgagtaaaagctcctggtcggtttacacgtacggggtacgcatcaaacgtcgttttgtgaatggtcgttttagtaatgagtcggatacaattgatattaccaaggatatggagaagactctggaaatgacagacatcaattggcgtgatggacatgatttgcgtcaggacattatcgactatgagattgtgcagcatattttcgaaatttttcgcctgacggtgcaaatgcgtaattccttaagcgaactggaagatcgcgactatgaccgcttaatttctcctgtgctgaatgagaacaacatcttctatgactcagcgaaagccggggacgctttgccaaaggatgcagatgctaacggtgcatattgtattgctctgaaaggcctttacgagatcaaacaaattactgaaaactggaaggaagatggaaagttttcccgtgataaattgaagatctctaataaggactggtttgactttatccaaaataaacgttattta

SEQ ID NO: 154 - protein, 1263 aa, synthetic construct
MNNGTNNFQNFIGISSLQKTLRNALIPTETTQQFIVKNGIIKEDELRGENRQILKDIMDDYYRGFISETLSSIDDIDWTSLFEKMEIQLKNGDNKDTLIKEQTEYRKAIHKKFANDDRFKNMFSAKLISDILPEFVIHNNNYSASEKEEKTQVIKLFSRFATSFKDYFKNRANCFSADDISSSSCHRIVNDNAEIFFSNALVYRRIVKSLSNDDINKISGDMKDSLKEMSLEEIYSYEKYGEFITQEGISFYNDICGKVNSFMNLYCQKNKENKNLYKLQKLHKQILCIADTSYEVPYKFESDEEVYQSVNGFLDNISSKHIVERLRKIGDNYNGYNLDKIYIVSKFYESVSQKTYRDWETINTALEIHYNNILPGNGKSKADKVKKAVKNDLQKSITEINELVSNYKLCSDDNIKAETYIHEISHILNNFEAQELKYNPEIHLVESELKASELKNVLDVIMNAFHWCSVFMTEELVDKDNNFYAELEEIYDEIYPVISLYNLVRNYVTQKPYSTKKIKLNFGIPTLADGWSKSKEYSNNAIILMRDNLYYLGIFNAKNKPDKKIIEGNTSENKGDYKKMIYNLLPGPNKMIPKVFLSSKTGVETYKPSAYILEGYKQNKHIKSSKDFDITFCHDLIDYFKNCIAIHPEWKNFGFDFSDTSTYEDISGFYREVELQGYKIDWTYISEKDIDLLQEKGQLYLFQIYNKDFSKKSTGNDNLHTMYLKNLFSEENLKDIVLKLNGEAEIFFRKSSIKNPIIHKKGSILVNRTYEAEEKDQFGNIQIVRKNIPENIYQELYKYFNDKSDKELSDEAAKLKNVVGHHEAAFNIVKDYRYTYDKYFLHMPITINFKANKTGFINDRILQYIAKEKDLHVIGIDRGERNLIYVSVIDTCGNIVEQKSFNIVNGYDYQIKLKQQEGARQIARKEWKEIGKIKEIKEGYLSLVIHEISKMVIKYNAIIAMEDLSYGFKKGRFKVERQVYQKFETMLINKLNYLVFKDISITENGGLLKGYQLTYIPDKLKNVGHQCGCIFYVPAAYTSKIDPTTGFVNIFKFKDLTVDAKREFIKKFDSIRYDSEKNLFCFTFDYNNFITQNTVMSKSSWSVYTYGVRIKRRFVNGRFSNESDTIDITKDMEKTLEMTDINWRDGHDLRQDIIDYEIVQHIFEIFRLTVQMRNSLSELEDRDYDRLISPVLNENNIFYDSAKAGDALPKDADANGAYCIALKGLYEIKQITENWKEDGKFSRDKLKISNKDWFDFIQNKRYL

SEQ ID NO: 155 - DNA, 3789 bp, synthetic construct
  source 1..3789: mol_type = other DNA
atgaataacggtaccaataactttcaaaattttatcgggatctcctcgttgcaaaaaactcttcgtaatgctttaatcccgactgagacaacacagcagttcatcgttaaaaacggcatcattaaagaagatgagctgcgcggcgagaaccgtcagattttaaaggacatcatggacgactattaccgtgggttcatctcagaaacattaagcagcatcgatgatatcgactggacctcactgtttgagaagatggagattcaacttaagaatggagacaacaaagacactttaattaaggagcagacggaatatcgtaaagctatccataaaaaatttgcaaacgatgaccgtttcaaaaatatgttttccgcaaaattgattagcgacattttacctgaattcgtaatccataacaacaactattccgcatctgaaaaagaggagaagacccaagttatcaaacttttttcacgtttcgcgacatcttttaaagactactttaagaatcgtgcgaattgtttcagtgcagatgatatttcgtctagttcatgtcaccgtatcgtgaatgacaacgctgagattttcttttctaatgcgttggtgtatcgccgcatcgtaaagtccttgtcgaatgatgatatcaacaaaattagtggtgacatgaaagactccctgaaagaaatgtcattagaggagatttacagctacgaaaaatacggagagttcatcactcaggaaggtatctccttttacaacgatatttgcggcaaagttaatagtttcatgaatctgtattgtcagaagaataaggaaaacaagaatctgtacaagttacaaaagcttcataaacagatcttgtgcatcgccgacacgtcttatgaagtcccgtataaatttgaaagcgacgaagaagtatatcagagtgtgaatggattcttggacaatatctcatcaaaacacattgttgaacgtttgcgcaaaatcggcgacaactataacggatacaacttggataaaatttatatcgtatcaaaattttatgaatcagtatcccaaaagacttaccgtgattgggagactattaatacggcgttagaaatccattacaacaacattctgccgggtaacggtaaatcgaaagcggacaaagtgaagaaggcggttaagaacgatcttcagaagtctatcacggagattaatgagctggtttccaattacaagttgtgctcggatgataacatcaaagctgaaacctatatccatgaaatttctcatattcttaataacttcgaggcacaagaattaaaatataacccagaaattcatctggttgagagcgaacttaaagcttcagaattaaaaaatgttttggacgtaattatgaacgccttccattggtgcagcgtgtttatgacagaggagttagtagataaggataacaacttttatgcagaattggaagagatctatgatgagatctatccagtgatttcactgtataacttagtccgtaattacgtcactcagaagccgtactcaactaaaaagatcaagttaaattttggaattccgacattggcggatggttggagtaagtctaaggaatactcaaataacgctattatcttaatgcgtgacaacctgtattacttgggtattttcaatgccaaaaataagcccgataaaaaaatcattgaagggaatacttcagaaaataagggagattacaaaaaaatgatttataaccttttgccaggcccaaacaaaatgatccccaaggtgtttttgagtagtaagacgggagtagaaacatataagccatcagcgtacattcttgaagggtacaaacaaaataaacacatcaagagcagcaaggactttgacattacattttgtcatgacttaatcgactactttaaaaattgcattgccattcaccctgagtggaaaaattttggtttcgacttcagtgatacctctacctatgaagatatctctggtttttatcgtgaggtagaacttcagggttacaagatcgattggacgtacatttccgagaaagacattgatcttttacaagagaagggtcagctttacttatttcagatctacaataaagacttttcgaaaaaatccacgggcaacgacaaccttcatacaatgtacttaaagaacctgttctctgaagaaaacttgaaagatatcgtgcttaaattgaatggcgaggccgagatttttttccgtaaaagctcgattaagaatcccatcatccacaagaaaggcagcattctggtaaatcgtacctatgaagcggaggaaaaggaccaatttggtaatattcagattgtccgtaagaacatccctgaaaatatctatcaagaattatataaatatttcaacgataagtcggacaaggaacttagcgatgaagccgcgaagttgaaaaatgttgttggtcaccacgaagcagcaacaaacattgtgaaagaccgtcgctacacttacgataagtactttttacatatgcctattacgattaactttaaggcaaataagacaggttttatcaacgaccgtatcctgcaatatattgcaaaagagaaggacctgcatgtcattgggattgatcgcggtgaacgcaatctgatttacgtgagtgttattgatacctgcggtaatattgttgagcaaaagtcttttaatatcgttaatggttacgactaccaaattaagcttaaacaacaggaaggtgcccgccagatcgcccgtaaggagtggaaggaaatcggaaaaattaaggaaatcaaagagggatatctgagcttggttattcatgaaatctcaaagatggttattaagtacaacgccatcatcgctatggaagacttatcgtatgggtttaaaaagggtcgtttcaaagttgagcgccaggtctaccaaaagtttgaaacgatgcttattaataaattaaactacttggttttcaaagatatctctattaccgagaatggaggtttactgaaaggataccagttaacgtatatccccgataagcttaaaaacgtgggccatcagtgtggctgtattttctatgtgcccgcggcatatacatcaaaaattgacccgacgacgggtttcgttaatatcttcaagttcaaagatctgacagttgatgcaaaacgcgaattcattaagaagttcgatagtattcgctatgactccgagaaaaatttgttttgcttcacttttgactacaataactttattactcagaatacagtcatgagtaaaagctcctggtcggtttacacgtacggggtacgcatcaaacgtcgttttgtgaatggtcgttttagtaatgagtcggatacaattgatattaccaaggatatggagaagactctggaaatgacagacatcaattggcgtgatggacatgatttgcgtcaggacattatcgactatgagattgtgcagcatattttcgaaatttttcgcctgacggtgcaaatgcgtaattccttaagcgaactggaagatcgcgactatgaccgcttaatttctcctgtgctgaatgagaacaacatcttctatgactcagcgaaagccggggacgctttgccaaaggatgcagatgctaacggtgcatattgtattgctctgaaaggcctttacgagatcaaacaaattactgaaaactggaaggaagatggaaagttttcccgtgataaattgaagatctctaataaggactggtttgactttatccaaaataaacgttattta

SEQ ID NO: 156 - protein, 1263 aa, synthetic construct
MNNGTNNFQNFIGISSLQKTLRNALIPTETTQQFIVKNGIIKEDELRGENRQILKDIMDDYYRGFISETLSSIDDIDWTSLFEKMEIQLKNGDNKDTLIKEQTEYRKAIHKKFANDDRFKNMFSAKLISDILPEFVIHNNNYSASEKEEKTQVIKLFSRFATSFKDYFKNRANCFSADDISSSSCHRIVNDNAEIFFSNALVYRRIVKSLSNDDINKISGDMKDSLKEMSLEEIYSYEKYGEFITQEGISFYNDICGKVNSFMNLYCQKNKENKNLYKLQKLHKQILCIADTSYEVPYKFESDEEVYQSVNGFLDNISSKHIVERLRKIGDNYNGYNLDKIYIVSKFYESVSQKTYRDWETINTALEIHYNNILPGNGKSKADKVKKAVKNDLQKSITEINELVSNYKLCSDDNIKAETYIHEISHILNNFEAQELKYNPEIHLVESELKASELKNVLDVIMNAFHWCSVFMTEELVDKDNNFYAELEEIYDEIYPVISLYNLVRNYVTQKPYSTKKIKLNFGIPTLADGWSKSKEYSNNAIILMRDNLYYLGIFNAKNKPDKKIIEGNTSENKGDYKKMIYNLLPGPNKMIPKVFLSSKTGVETYKPSAYILEGYKQNKHIKSSKDFDITFCHDLIDYFKNCIAIHPEWKNFGFDFSDTSTYEDISGFYREVELQGYKIDWTYISEKDIDLLQEKGQLYLFQIYNKDFSKKSTGNDNLHTMYLKNLFSEENLKDIVLKLNGEAEIFFRKSSIKNPIIHKKGSILVNRTYEAEEKDQFGNIQIVRKNIPENIYQELYKYFNDKSDKELSDEAAKLKNVVGHHEAATNIVKDRRYTYDKYFLHMPITINFKANKTGFINDRILQYIAKEKDLHVIGIDRGERNLIYVSVIDTCGNIVEQKSFNIVNGYDYQIKLKQQEGARQIARKEWKEIGKIKEIKEGYLSLVIHEISKMVIKYNAIIAMEDLSYGFKKGRFKVERQVYQKFETMLINKLNYLVFKDISITENGGLLKGYQLTYIPDKLKNVGHQCGCIFYVPAAYTSKIDPTTGFVNIFKFKDLTVDAKREFIKKFDSIRYDSEKNLFCFTFDYNNFITQNTVMSKSSWSVYTYGVRIKRRFVNGRFSNESDTIDITKDMEKTLEMTDINWRDGHDLRQDIIDYEIVQHIFEIFRLTVQMRNSLSELEDRDYDRLISPVLNENNIFYDSAKAGDALPKDADANGAYCIALKGLYEIKQITENWKEDGKFSRDKLKISNKDWFDFIQNKRYL

SEQ ID NO: 157 - DNA, 3789 bp, synthetic construct
  source 1..3789: mol_type = other DNA
atgaataacggtaccaataactttcaaaattttatcgggatctcctcgttgcaaaaaactcttcgtaatgctttaatcccgactgagacaacacagcagttcatcgttaaaaacggcatcattaaagaagatgagctgcgcggcgagaaccgtcagattttaaaggacatcatggacgactattaccgtgggttcatctcagaaacattaagcagcatcgatgatatcgactggacctcactgtttgagaagatggagattcaacttaagaatggagacaacaaagacactttaattaaggagcagacggaatatcgtaaagctatccataaaaaatttgcaaacgatgaccgtttcaaaaatatgttttccgcaaaattgattagcgacattttacctgaattcgtaatccataacaacaactattccgcatctgaaaaagaggagaagacccaagttatcaaacttttttcacgtttcgcgacatcttttaaagactactttaagaatcgtgcgaattgtttcagtgcagatgatatttcgtctagttcatgtcaccgtatcgtgaatgacaacgctgagattttcttttctaatgcgttggtgtatcgccgcatcgtaaagtccttgtcgaatgatgatatcaacaaaattagtggtgacatgaaagactccctgaaagaaatgtcattagaggagatttacagctacgaaaaatacggagagttcatcactcaggaaggtatctccttttacaacgatatttgcggcaaagttaatagtttcatgaatctgtattgtcagaagaataaggaaaacaagaatctgtacaagttacaaaagcttcataaacagatcttgtgcatcgccgacacgtcttatgaagtcccgtataaatttgaaagcgacgaagaagtatatcagagtgtgaatggattcttggacaatatctcatcaaaacacattgttgaacgtttgcgcaaaatcggcgacaactataacggatacaacttggataaaatttatatcgtatcaaaattttatgaatcagtatcccaaaagacttaccgtgattgggagactattaatacggcgttagaaatccattacaacaacattctgccgggtaacggtaaatcgaaagcggacaaagtgaagaaggcggttaagaacgatcttcagaagtctatcacggagattaatgagctggtttccaattacaagttgtgctcggatgataacatcaaagctgaaacctatatccatgaaatttctcatattcttaataacttcgaggcacaagaattaaaatataacccagaaattcatctggttgagagcgaacttaaagcttcagaattaaaaaatgttttggacgtaattatgaacgccttccattggtgcagcgtgtttatgacagaggagttagtagataaggataacaacttttatgcagaattggaagagatctatgatgagatctatccagtgatttcactgtataacttagtccgtaattacgtcactcagaagccgtactcaactaaaaagatcaagttaaattttggaattccgacattggcggatggttggagtaagtctaaggaatactcaaataacgctattatcttaatgcgtgacaacctgtattacttgggtattttcaatgccaaaaataagcccgataaaaaaatcattgaagggaatacttcagaaaataagggagattacaaaaaaatgatttataaccttttgccaggcccaaacaaaatgatccccaaggtgtttttgagtagtaagacgggagtagaaacatataagccatcagcgtacattcttgaagggtacaaacaaaataaacacatcaagagcagcaaggactttgacattacattttgtcatgacttaatcgactactttaaaaattgcattgccattcaccctgagtggaaaaattttggtttcgacttcagtgatacctctacctatgaagatatctctggtttttatcgtgaggtagaacttcagggttacaagatcgattggacgtacatttccgagaaagacattgatcttttacaagagaagggtcagctttacttatttcagatctacaataaagacttttcgaaaaaatccacgggcaacgacaaccttcatacaatgtacttaaagaacctgttctctgaagaaaacttgaaagatatcgtgcttaaattgaatggcgaggccgagatttttttccgtaaaagctcgattaagaatcccatcatccacaagaaaggcagcattctggtaaatcgtacctatgaagcggaggaaaaggaccaatttggtaatattcagattgtccgtaagaacatccctgaaaatatctatcaagaattatataaatatttcaacgataagtcggacaaggaacttagcgatgaagccgcgaagttgaaaaatgttgttggtcaccacgaagcagcaacaaacattgtgaaagactatcgctacactcaggataagtactttttacatatgcctattacgattaactttaaggcaaataagacaggttttatcaacgaccgtatcctgcaatatattgcaaaagagaaggacctgcatgtcattgggattgatcgcggtgaacgcaatctgatttacgtgagtgttattgatacctgcggtaatattgttgagcaaaagtcttttaatatcgttaatggttacgactaccaaattaagcttaaacaacaggaaggtgcccgccagatcgcccgtaaggagtggaaggaaatcggaaaaattaaggaaatcaaagagggatatctgagcttggttattcatgaaatctcaaagatggttattaagtacaacgccatcatcgctatggaagacttatcgtatgggtttaaaaagggtcgtttcaaagttgagcgccaggtctaccaaaagtttgaaacgatgcttattaataaattaaactacttggttttcaaagatatctctattaccgagaatggaggtttactgaaaggataccagttaacgtatatccccgataagcttaaaaacgtgggccatcagtgtggctgtattttctatgtgcccgcggcatatacatcaaaaattgacccgacgacgggtttcgttaatatcttcaagttcaaagatctgacagttgatgcaaaacgcgaattcattaagaagttcgatagtattcgctatgactccgagaaaaatttgttttgcttcacttttgactacaataactttattactcagaatacagtcatgagtaaaagctcctggtcggtttacacgtacggggtacgcatcaaacgtcgttttgtgaatggtcgttttagtaatgagtcggatacaattgatattaccaaggatatggagaagactctggaaatgacagacatcaattggcgtgatggacatgatttgcgtcaggacattatcgactatgagattgtgcagcatattttcgaaatttttcgcctgacggtgcaaatgcgtaattccttaagcgaactggaagatcgcgactatgaccgcttaatttctcctgtgctgaatgagaacaacatcttctatgactcagcgaaagccggggacgctttgccaaaggatgcagatgctaacggtgcatattgtattgctctgaaaggcctttacgagatcaaacaaattactgaaaactggaaggaagatggaaagttttcccgtgataaattgaagatctctaataaggactggtttgactttatccaaaataaacgttattta

SEQ ID NO: 158 - protein, 1263 aa, synthetic construct
MNNGTNNFQNFIGISSLQKTLRNALIPTETTQQFIVKNGIIKEDELRGENRQILKDIMDDYYRGFISETLSSIDDIDWTSLFEKMEIQLKNGDNKDTLIKEQTEYRKAIHKKFANDDRFKNMFSAKLISDILPEFVIHNNNYSASEKEEKTQVIKLFSRFATSFKDYFKNRANCFSADDISSSSCHRIVNDNAEIFFSNALVYRRIVKSLSNDDINKISGDMKDSLKEMSLEEIYSYEKYGEFITQEGISFYNDICGKVNSFMNLYCQKNKENKNLYKLQKLHKQILCIADTSYEVPYKFESDEEVYQSVNGFLDNISSKHIVERLRKIGDNYNGYNLDKIYIVSKFYESVSQKTYRDWETINTALEIHYNNILPGNGKSKADKVKKAVKNDLQKSITEINELVSNYKLCSDDNIKAETYIHEISHILNNFEAQELKYNPEIHLVESELKASELKNVLDVIMNAFHWCSVFMTEELVDKDNNFYAELEEIYDEIYPVISLYNLVRNYVTQKPYSTKKIKLNFGIPTLADGWSKSKEYSNNAIILMRDNLYYLGIFNAKNKPDKKIIEGNTSENKGDYKKMIYNLLPGPNKMIPKVFLSSKTGVETYKPSAYILEGYKQNKHIKSSKDFDITFCHDLIDYFKNCIAIHPEWKNFGFDFSDTSTYEDISGFYREVELQGYKIDWTYISEKDIDLLQEKGQLYLFQIYNKDFSKKSTGNDNLHTMYLKNLFSEENLKDIVLKLNGEAEIFFRKSSIKNPIIHKKGSILVNRTYEAEEKDQFGNIQIVRKNIPENIYQELYKYFNDKSDKELSDEAAKLKNVVGHHEAATNIVKDYRYTQDKYFLHMPITINFKANKTGFINDRILQYIAKEKDLHVIGIDRGERNLIYVSVIDTCGNIVEQKSFNIVNGYDYQIKLKQQEGARQIARKEWKEIGKIKEIKEGYLSLVIHEISKMVIKYNAIIAMEDLSYGFKKGRFKVERQVYQKFETMLINKLNYLVFKDISITENGGLLKGYQLTYIPDKLKNVGHQCGCIFYVPAAYTSKIDPTTGFVNIFKFKDLTVDAKREFIKKFDSIRYDSEKNLFCFTFDYNNFITQNTVMSKSSWSVYTYGVRIKRRFVNGRFSNESDTIDITKDMEKTLEMTDINWRDGHDLRQDIIDYEIVQHIFEIFRLTVQMRNSLSELEDRDYDRLISPVLNENNIFYDSAKAGDALPKDADANGAYCIALKGLYEIKQITENWKEDGKFSRDKLKISNKDWFDFIQNKRYL

SEQ ID NO: 159 - DNA, 3789 bp, synthetic construct
  source 1..3789: mol_type = other DNA
atgaataacggtaccaataactttcaaaattttatcgggatctcctcgttgcaaaaaactcttcgtaatgctttaatcccgactgagacaacacagcagttcatcgttaaaaacggcatcattaaagaagatgagctgcgcggcgagaaccgtcagattttaaaggacatcatggacgactattaccgtgggttcatctcagaaacattaagcagcatcgatgatatcgactggacctcactgtttgagaagatggagattcaacttaagaatggagacaacaaagacactttaattaaggagcagacggaatatcgtaaagctatccataaaaaatttgcaaacgatgaccgtttcaaaaatatgttttccgcaaaattgattagcgacattttacctgaattcgtaatccataacaacaactattccgcatctgaaaaagaggagaagacccaagttatcaaacttttttcacgtttcgcgacatcttttaaagactactttaagaatcgtgcgaattgtttcagtgcagatgatatttcgtctagttcatgtcaccgtatcgtgaatgacaacgctgagattttcttttctaatgcgttggtgtatcgccgcatcgtaaagtccttgtcgaatgatgatatcaacaaaattagtggtgacatgaaagactccctgaaagaaatgtcattagaggagatttacagctacgaaaaatacggagagttcatcactcaggaaggtatctccttttacaacgatatttgcggcaaagttaatagtttcatgaatctgtattgtcagaagaataaggaaaacaagaatctgtacaagttacaaaagcttcataaacagatcttgtgcatcgccgacacgtcttatgaagtcccgtataaatttgaaagcgacgaagaagtatatcagagtgtgaatggattcttggacaatatctcatcaaaacacattgttgaacgtttgcgcaaaatcggcgacaactataacggatacaacttggataaaatttatatcgtatcaaaattttatgaatcagtatcccaaaagacttaccgtgattgggagactattaatacggcgttagaaatccattacaacaacattctgccgggtaacggtaaatcgaaagcggacaaagtgaagaaggcggttaagaacgatcttcagaagtctatcacggagattaatgagctggtttccaattacaagttgtgctcggatgataacatcaaagctgaaacctatatccatgaaatttctcatattcttaataacttcgaggcacaagaattaaaatataacccagaaattcatctggttgagagcgaacttaaagcttcagaattaaaaaatgttttggacgtaattatgaacgccttccattggtgcagcgtgtttatgacagaggagttagtagataaggataacaacttttatgcagaattggaagagatctatgatgagatctatccagtgatttcactgtataacttagtccgtaattacgtcactcagaagccgtactcaactaaaaagatcaagttaaattttggaattccgacattggcggatggttggagtaagtctaaggaatactcaaataacgctattatcttaatgcgtgacaacctgtattacttgggtattttcaatgccaaaaataagcccgataaaaaaatcattgaagggaatacttcagaaaataagggagattacaaaaaaatgatttataaccttttgccaggcccaaacaaaatgatccccaaggtgtttttgagtagtaagacgggagtagaaacatataagccatcagcgtacattcttgaagggtacaaacaaaataaacacatcaagagcagcaaggactttgacattacattttgtcatgacttaatcgactactttaaaaattgcattgccattcaccctgagtggaaaaattttggtttcgacttcagtgatacctctacctatgaagatatctctggtttttatcgtgaggtagaacttcagggttacaagatcgattggacgtacatttccgagaaagacattgatcttttacaagagaagggtcagctttacttatttcagatctacaataaagacttttcgaaaaaatccacgggcaacgacaaccttcatacaatgtacttaaagaacctgttctctgaagaaaacttgaaagatatcgtgcttaaattgaatggcgaggccgagatttttttccgtaaaagctcgattaagaatcccatcatccacaagaaaggcagcattctggtaaatcgtacctatgaagcggaggaaaaggaccaatttggtaatattcagattgtccgtaagaacatccctgaaaatatctatcaagaattatataaatatttcaacgataagtcggacaaggaacttagcgatgaagccgcgaagttgaaaaatgttgttggtcaccacgaagcagcaacaaacattgtgaaagactatcgctacactaaagataagtactttttacatatgcctattacgattaactttaaggcaaataagacaggttttatcaacgaccgtatcctgcaatatattgcaaaagagaaggacctgcatgtcattgggattgatcgcggtgaacgcaatctgatttacgtgagtgttattgatacctgcggtaatattgttgagcaaaagtcttttaatatcgttaatggttacgactaccaaattaagcttaaacaacaggaaggtgcccgccagatcgcccgtaaggagtggaaggaaatcggaaaaattaaggaaatcaaagagggatatctgagcttggttattcatgaaatctcaaagatggttattaagtacaacgccatcatcgctatggaagacttatcgtatgggtttaaaaagggtcgtttcaaagttgagcgccaggtctaccaaaagtttgaaacgatgcttattaataaattaaactacttggttttcaaagatatctctattaccgagaatggaggtttactgaaaggataccagttaacgtatatccccgataagcttaaaaacgtgggccatcagtgtggctgtattttctatgtgcccgcggcatatacatcaaaaattgacccgacgacgggtttcgttaatatcttcaagttcaaagatctgacagttgatgcaaaacgcgaattcattaagaagttcgatagtattcgctatgactccgagaaaaatttgttttgcttcacttttgactacaataactttattactcagaatacagtcatgagtaaaagctcctggtcggtttacacgtacggggtacgcatcaaacgtcgttttgtgaatggtcgttttagtaatgagtcggatacaattgatattaccaaggatatggagaagactctggaaatgacagacatcaattggcgtgatggacatgatttgcgtcaggacattatcgactatgagattgtgcagcatattttcgaaatttttcgcctgacggtgcaaatgcgtaattccttaagcgaactggaagatcgcgactatgaccgcttaatttctcctgtgctgaatgagaacaacatcttctatgactcagcgaaagccggggacgctttgccaaaggatgcagatgctaacggtgcatattgtattgctctgaaaggcctttacgagatcaaacaaattactgaaaactggaaggaagatggaaagttttcccgtgataaattgaagatctctaataaggactggtttgactttatccaaaataaacgttattta

SEQ ID NO: 160 - protein, 1263 aa, synthetic construct
MNNGTNNFQNFIGISSLQKTLRNALIPTETTQQFIVKNGIIKEDELRGENRQILKDIMDDYYRGFISETLSSIDDIDWTSLFEKMEIQLKNGDNKDTLIKEQTEYRKAIHKKFANDDRFKNMFSAKLISDILPEFVIHNNNYSASEKEEKTQVIKLFSRFATSFKDYFKNRANCFSADDISSSSCHRIVNDNAEIFFSNALVYRRIVKSLSNDDINKISGDMKDSLKEMSLEEIYSYEKYGEFITQEGISFYNDICGKVNSFMNLYCQKNKENKNLYKLQKLHKQILCIADTSYEVPYKFESDEEVYQSVNGFLDNISSKHIVERLRKIGDNYNGYNLDKIYIVSKFYESVSQKTYRDWETINTALEIHYNNILPGNGKSKADKVKKAVKNDLQKSITEINELVSNYKLCSDDNIKAETYIHEISHILNNFEAQELKYNPEIHLVESELKASELKNVLDVIMNAFHWCSVFMTEELVDKDNNFYAELEEIYDEIYPVISLYNLVRNYVTQKPYSTKKIKLNFGIPTLADGWSKSKEYSNNAIILMRDNLYYLGIFNAKNKPDKKIIEGNTSENKGDYKKMIYNLLPGPNKMIPKVFLSSKTGVETYKPSAYILEGYKQNKHIKSSKDFDITFCHDLIDYFKNCIAIHPEWKNFGFDFSDTSTYEDISGFYREVELQGYKIDWTYISEKDIDLLQEKGQLYLFQIYNKDFSKKSTGNDNLHTMYLKNLFSEENLKDIVLKLNGEAEIFFRKSSIKNPIIHKKGSILVNRTYEAEEKDQFGNIQIVRKNIPENIYQELYKYFNDKSDKELSDEAAKLKNVVGHHEAATNIVKDYRYTKDKYFLHMPITINFKANKTGFINDRILQYIAKEKDLHVIGIDRGERNLIYVSVIDTCGNIVEQKSFNIVNGYDYQIKLKQQEGARQIARKEWKEIGKIKEIKEGYLSLVIHEISKMVIKYNAIIAMEDLSYGFKKGRFKVERQVYQKFETMLINKLNYLVFKDISITENGGLLKGYQLTYIPDKLKNVGHQCGCIFYVPAAYTSKIDPTTGFVNIFKFKDLTVDAKREFIKKFDSIRYDSEKNLFCFTFDYNNFITQNTVMSKSSWSVYTYGVRIKRRFVNGRFSNESDTIDITKDMEKTLEMTDINWRDGHDLRQDIIDYEIVQHIFEIFRLTVQMRNSLSELEDRDYDRLISPVLNENNIFYDSAKAGDALPKDADANGAYCIALKGLYEIKQITENWKEDGKFSRDKLKISNKDWFDFIQNKRYL

SEQ ID NO: 161 - DNA, 3789 bp, synthetic construct
  source 1..3789: mol_type = other DNA
atgaataacggtaccaataactttcaaaattttatcgggatctcctcgttgcaaaaaactcttcgtaatgctttaatcccgactgagacaacacagcagttcatcgttaaaaacggcatcattaaagaagatgagctgcgcggcgagaaccgtcagattttaaaggacatcatggacgactattaccgtgggttcatctcagaaacattaagcagcatcgatgatatcgactggacctcactgtttgagaagatggagattcaacttaagaatggagacaacaaagacactttaattaaggagcagacggaatatcgtaaagctatccataaaaaatttgcaaacgatgaccgtttcaaaaatatgttttccgcaaaattgattagcgacattttacctgaattcgtaatccataacaacaactattccgcatctgaaaaagaggagaagacccaagttatcaaacttttttcacgtttcgcgacatcttttaaagactactttaagaatcgtgcgaattgtttcagtgcagatgatatttcgtctagttcatgtcaccgtatcgtgaatgacaacgctgagattttcttttctaatgcgttggtgtatcgccgcatcgtaaagtccttgtcgaatgatgatatcaacaaaattagtggtgacatgaaagactccctgaaagaaatgtcattagaggagatttacagctacgaaaaatacggagagttcatcactcaggaaggtatctccttttacaacgatatttgcggcaaagttaatagtttcatgaatctgtattgtcagaagaataaggaaaacaagaatctgtacaagttacaaaagcttcataaacagatcttgtgcatcgccgacacgtcttatgaagtcccgtataaatttgaaagcgacgaagaagtatatcagagtgtgaatggattcttggacaatatctcatcaaaacacattgttgaacgtttgcgcaaaatcggcgacaactataacggatacaacttggataaaatttatatcgtatcaaaattttatgaatcagtatcccaaaagacttaccgtgattgggagactattaatacggcgttagaaatccattacaacaacattctgccgggtaacggtaaatcgaaagcggacaaagtgaagaaggcggttaagaacgatcttcagaagtctatcacggagattaatgagctggtttccaattacaagttgtgctcggatgataacatcaaagctgaaacctatatccatgaaatttctcatattcttaataacttcgaggcacaagaattaaaatataacccagaaattcatctggttgagagcgaacttaaagcttcagaattaaaaaatgttttggacgtaattatgaacgccttccattggtgcagcgtgtttatgacagaggagttagtagataaggataacaacttttatgcagaattggaagagatctatgatgagatctatccagtgatttcactgtataacttagtccgtaattacgtcactcagaagccgtactcaactaaaaagatcaagttaaattttggaattccgacattggcggatggttggagtaagtctaaggaatactcaaataacgctattatcttaatgcgtgacaacctgtattacttgggtattttcaatgccaaaaataagcccgataaaaaaatcattgaagggaatacttcagaaaataagggagattacaaaaaaatgatttataaccttttgccaggcccaaacaaaatgatccccaaggtgtttttgagtagtaagacgggagtagaaacatataagccatcagcgtacattcttgaagggtacaaacaaaataaacacatcaagagcagcaaggactttgacattacattttgtcatgacttaatcgactactttaaaaattgcattgccattcaccctgagtggaaaaattttggtttcgacttcagtgatacctctacctatgaagatatctctggtttttatcgtgaggtagaacttcagggttacaagatcgattggacgtacatttccgagaaagacattgatcttttacaagagaagggtcagctttacttatttcagatctacaataaagacttttcgaaaaaatccacgggcaacgacaaccttcatacaatgtacttaaagaacctgttctctgaagaaaacttgaaagatatcgtgcttaaattgaatggcgaggccgagatttttttccgtaaaagctcgattaagaatcccatcatccacaagaaaggcagcattctggtaaatcgtacctatgaagcggaggaaaaggaccaatttggtaatattcagattgtccgtaagaacatccctgaaaatatctatcaagaattatataaatatttcaacgataagtcggacaaggaacttagcgatgaagccgcgaagttgaaaaatgttgttggtcaccacgaagcagcaacaaacattgtgaaagactatcgctacacttacgataagctgtttttacatatgcctattacgattaactttaaggcaaataagacaggttttatcaacgaccgtatcctgcaatatattgcaaaagagaaggacctgcatgtcattgggattgatcgcggtgaacgcaatctgatttacgtgagtgttattgatacctgcggtaatattgttgagcaaaagtcttttaatatcgttaatggttacgactaccaaattaagcttaaacaacaggaaggtgcccgccagatcgcccgtaaggagtggaaggaaatcggaaaaattaaggaaatcaaagagggatatctgagcttggttattcatgaaatctcaaagatggttattaagtacaacgccatcatcgctatggaagacttatcgtatgggtttaaaaagggtcgtttcaaagttgagcgccaggtctaccaaaagtttgaaacgatgcttattaataaattaaactacttggttttcaaagatatctctattaccgagaatggaggtttactgaaaggataccagttaacgtatatccccgataagcttaaaaacgtgggccatcagtgtggctgtattttctatgtgcccgcggcatatacatcaaaaattgacccgacgacgggtttcgttaatatcttcaagttcaaagatctgacagttgatgcaaaacgcgaattcattaagaagttcgatagtattcgctatgactccgagaaaaatttgttttgcttcacttttgactacaataactttattactcagaatacagtcatgagtaaaagctcctggtcggtttacacgtacggggtacgcatcaaacgtcgttttgtgaatggtcgttttagtaatgagtcggatacaattgatattaccaaggatatggagaagactctggaaatgacagacatcaattggcgtgatggacatgatttgcgtcaggacattatcgactatgagattgtgcagcatattttcgaaatttttcgcctgacggtgcaaatgcgtaattccttaagcgaactggaagatcgcgactatgaccgcttaatttctcctgtgctgaatgagaacaacatcttctatgactcagcgaaagccggggacgctttgccaaaggatgcagatgctaacggtgcatattgtattgctctgaaaggcctttacgagatcaaacaaattactgaaaactggaaggaagatggaaagttttcccgtgataaattgaagatctctaataaggactggtttgactttatccaaaataaacgttattta

SEQ ID NO: 162 - protein, 1263 aa, synthetic construct
MNNGTNNFQNFIGISSLQKTLRNALIPTETTQQFIVKNGIIKEDELRGENRQILKDIMDDYYRGFISETLSSIDDIDWTSLFEKMEIQLKNGDNKDTLIKEQTEYRKAIHKKFANDDRFKNMFSAKLISDILPEFVIHNNNYSASEKEEKTQVIKLFSRFATSFKDYFKNRANCFSADDISSSSCHRIVNDNAEIFFSNALVYRRIVKSLSNDDINKISGDMKDSLKEMSLEEIYSYEKYGEFITQEGISFYNDICGKVNSFMNLYCQKNKENKNLYKLQKLHKQILCIADTSYEVPYKFESDEEVYQSVNGFLDNISSKHIVERLRKIGDNYNGYNLDKIYIVSKFYESVSQKTYRDWETINTALEIHYNNILPGNGKSKADKVKKAVKNDLQKSITEINELVSNYKLCSDDNIKAETYIHEISHILNNFEAQELKYNPEIHLVESELKASELKNVLDVIMNAFHWCSVFMTEELVDKDNNFYAELEEIYDEIYPVISLYNLVRNYVTQKPYSTKKIKLNFGIPTLADGWSKSKEYSNNAIILMRDNLYYLGIFNAKNKPDKKIIEGNTSENKGDYKKMIYNLLPGPNKMIPKVFLSSKTGVETYKPSAYILEGYKQNKHIKSSKDFDITFCHDLIDYFKNCIAIHPEWKNFGFDFSDTSTYEDISGFYREVELQGYKIDWTYISEKDIDLLQEKGQLYLFQIYNKDFSKKSTGNDNLHTMYLKNLFSEENLKDIVLKLNGEAEIFFRKSSIKNPIIHKKGSILVNRTYEAEEKDQFGNIQIVRKNIPENIYQELYKYFNDKSDKELSDEAAKLKNVVGHHEAATNIVKDYRYTYDKLFLHMPITINFKANKTGFINDRILQYIAKEKDLHVIGIDRGERNLIYVSVIDTCGNIVEQKSFNIVNGYDYQIKLKQQEGARQIARKEWKEIGKIKEIKEGYLSLVIHEISKMVIKYNAIIAMEDLSYGFKKGRFKVERQVYQKFETMLINKLNYLVFKDISITENGGLLKGYQLTYIPDKLKNVGHQCGCIFYVPAAYTSKIDPTTGFVNIFKFKDLTVDAKREFIKKFDSIRYDSEKNLFCFTFDYNNFITQNTVMSKSSWSVYTYGVRIKRRFVNGRFSNESDTIDITKDMEKTLEMTDINWRDGHDLRQDIIDYEIVQHIFEIFRLTVQMRNSLSELEDRDYDRLISPVLNENNIFYDSAKAGDALPKDADANGAYCIALKGLYEIKQITENWKEDGKFSRDKLKISNKDWFDFIQNKRYL

SEQ ID NO: 163 - DNA, 3789 bp, synthetic construct
  source 1..3789: mol_type = other DNA
atgaataacggtaccaataactttcaaaattttatcgggatctcctcgttgcaaaaaactcttcgtaatgctttaatcccgactgagacaacacagcagttcatcgttaaaaacggcatcattaaagaagatgagctgcgcggcgagaaccgtcagattttaaaggacatcatggacgactattaccgtgggttcatctcagaaacattaagcagcatcgatgatatcgactggacctcactgtttgagaagatggagattcaacttaagaatggagacaacaaagacactttaattaaggagcagacggaatatcgtaaagctatccataaaaaatttgcaaacgatgaccgtttcaaaaatatgttttccgcaaaattgattagcgacattttacctgaattcgtaatccataacaacaactattccgcatctgaaaaagaggagaagacccaagttatcaaacttttttcacgtttcgcgacatcttttaaagactactttaagaatcgtgcgaattgtttcagtgcagatgatatttcgtctagttcatgtcaccgtatcgtgaatgacaacgctgagattttcttttctaatgcgttggtgtatcgccgcatcgtaaagtccttgtcgaatgatgatatcaacaaaattagtggtgacatgaaagactccctgaaagaaatgtcattagaggagatttacagctacgaaaaatacggagagttcatcactcaggaaggtatctccttttacaacgatatttgcggcaaagttaatagtttcatgaatctgtattgtcagaagaataaggaaaacaagaatctgtacaagttacaaaagcttcataaacagatcttgtgcatcgccgacacgtcttatgaagtcccgtataaatttgaaagcgacgaagaagtatatcagagtgtgaatggattcttggacaatatctcatcaaaacacattgttgaacgtttgcgcaaaatcggcgacaactataacggatacaacttggataaaatttatatcgtatcaaaattttatgaatcagtatcccaaaagacttaccgtgattgggagactattaatacggcgttagaaatccattacaacaacattctgccgggtaacggtaaatcgaaagcggacaaagtgaagaaggcggttaagaacgatcttcagaagtctatcacggagattaatgagctggtttccaattacaagttgtgctcggatgataacatcaaagctgaaacctatatccatgaaatttctcatattcttaataacttcgaggcacaagaattaaaatataacccagaaattcatctggttgagagcgaacttaaagcttcagaattaaaaaatgttttggacgtaattatgaacgccttccattggtgcagcgtgtttatgacagaggagttagtagataaggataacaacttttatgcagaattggaagagatctatgatgagatctatccagtgatttcactgtataacttagtccgtaattacgtcactcagaagccgtactcaactaaaaagatcaagttaaattttggaattccgacattggcggatggttggagtaagtctaaggaatactcaaataacgctattatcttaatgcgtgacaacctgtattacttgggtattttcaatgccaaaaataagcccgataaaaaaatcattgaagggaatacttcagaaaataagggagattacaaaaaaatgatttataaccttttgccaggcccaaacaaaatgatccccaaggtgtttttgagtagtaagacgggagtagaaacatataagccatcagcgtacattcttgaagggtacaaacaaaataaacacatcaagagcagcaaggactttgacattacattttgtcatgacttaatcgactactttaaaaattgcattgccattcaccctgagtggaaaaattttggtttcgacttcagtgatacctctacctatgaagatatctctggtttttatcgtgaggtagaacttcagggttacaagatcgattggacgtacatttccgagaaagacattgatcttttacaagagaagggtcagctttacttatttcagatctacaataaagacttttcgaaaaaatccacgggcaacgacaaccttcatacaatgtacttaaagaacctgttctctgaagaaaacttgaaagatatcgtgcttaaattgaatggcgaggccgagatttttttccgtaaaagctcgattaagaatcccatcatccacaagaaaggcagcattctggtaaatcgtacctatgaagcggaggaaaaggaccaatttggtaatattcagattgtccgtaagaacatccctgaaaatatctatcaagaattatataaatatttcaacgataagtcggacaaggaacttagcgatgaagccgcgaagttgaaaaatgttgttggtcaccacgaagcagcaacaaacattgtgaaagactatcgctacacttacgataagtacctgttacatatgcctattacgattaactttaaggcaaataagacaggttttatcaacgaccgtatcctgcaatatattgcaaaagagaaggacctgcatgtcattgggattgatcgcggtgaacgcaatctgatttacgtgagtgttattgatacctgcggtaatattgttgagcaaaagtcttttaatatcgttaatggttacgactaccaaattaagcttaaacaacaggaaggtgcccgccagatcgcccgtaaggagtggaaggaaatcggaaaaattaaggaaatcaaagagggatatctgagcttggttattcatgaaatctcaaagatggttattaagtacaacgccatcatcgctatggaagacttatcgtatgggtttaaaaagggtcgtttcaaagttgagcgccaggtctaccaaaagtttgaaacgatgcttattaataaattaaactacttggttttcaaagatatctctattaccgagaatggaggtttactgaaaggataccagttaacgtatatccccgataagcttaaaaacgtgggccatcagtgtggctgtattttctatgtgcccgcggcatatacatcaaaaattgacccgacgacgggtttcgttaatatcttcaagttcaaagatctgacagttgatgcaaaacgcgaattcattaagaagttcgatagtattcgctatgactccgagaaaaatttgttttgcttcacttttgactacaataactttattactcagaatacagtcatgagtaaaagctcctggtcggtttacacgtacggggtacgcatcaaacgtcgttttgtgaatggtcgttttagtaatgagtcggatacaattgatattaccaaggatatggagaagactctggaaatgacagacatcaattggcgtgatggacatgatttgcgtcaggacattatcgactatgagattgtgcagcatattttcgaaatttttcgcctgacggtgcaaatgcgtaattccttaagcgaactggaagatcgcgactatgaccgcttaatttctcctgtgctgaatgagaacaacatcttctatgactcagcgaaagccggggacgctttgccaaaggatgcagatgctaacggtgcatattgtattgctctgaaaggcctttacgagatcaaacaaattactgaaaactggaaggaagatggaaagttttcccgtgataaattgaagatctctaataaggactggtttgactttatccaaaataaacgttattta

SEQ ID NO: 164 - protein, 1263 aa, synthetic construct
MNNGTNNFQNFIGISSLQKTLRNALIPTETTQQFIVKNGIIKEDELRGENRQILKDIMDDYYRGFISETLSSIDDIDWTSLFEKMEIQLKNGDNKDTLIKEQTEYRKAIHKKFANDDRFKNMFSAKLISDILPEFVIHNNNYSASEKEEKTQVIKLFSRFATSFKDYFKNRANCFSADDISSSSCHRIVNDNAEIFFSNALVYRRIVKSLSNDDINKISGDMKDSLKEMSLEEIYSYEKYGEFITQEGISFYNDICGKVNSFMNLYCQKNKENKNLYKLQKLHKQILCIADTSYEVPYKFESDEEVYQSVNGFLDNISSKHIVERLRKIGDNYNGYNLDKIYIVSKFYESVSQKTYRDWETINTALEIHYNNILPGNGKSKADKVKKAVKNDLQKSITEINELVSNYKLCSDDNIKAETYIHEISHILNNFEAQELKYNPEIHLVESELKASELKNVLDVIMNAFHWCSVFMTEELVDKDNNFYAELEEIYDEIYPVISLYNLVRNYVTQKPYSTKKIKLNFGIPTLADGWSKSKEYSNNAIILMRDNLYYLGIFNAKNKPDKKIIEGNTSENKGDYKKMIYNLLPGPNKMIPKVFLSSKTGVETYKPSAYILEGYKQNKHIKSSKDFDITFCHDLIDYFKNCIAIHPEWKNFGFDFSDTSTYEDISGFYREVELQGYKIDWTYISEKDIDLLQEKGQLYLFQIYNKDFSKKSTGNDNLHTMYLKNLFSEENLKDIVLKLNGEAEIFFRKSSIKNPIIHKKGSILVNRTYEAEEKDQFGNIQIVRKNIPENIYQELYKYFNDKSDKELSDEAAKLKNVVGHHEAATNIVKDYRYTYDKYLLHMPITINFKANKTGFINDRILQYIAKEKDLHVIGIDRGERNLIYVSVIDTCGNIVEQKSFNIVNGYDYQIKLKQQEGARQIARKEWKEIGKIKEIKEGYLSLVIHEISKMVIKYNAIIAMEDLSYGFKKGRFKVERQVYQKFETMLINKLNYLVFKDISITENGGLLKGYQLTYIPDKLKNVGHQCGCIFYVPAAYTSKIDPTTGFVNIFKFKDLTVDAKREFIKKFDSIRYDSEKNLFCFTFDYNNFITQNTVMSKSSWSVYTYGVRIKRRFVNGRFSNESDTIDITKDMEKTLEMTDINWRDGHDLRQDIIDYEIVQHIFEIFRLTVQMRNSLSELEDRDYDRLISPVLNENNIFYDSAKAGDALPKDADANGAYCIALKGLYEIKQITENWKEDGKFSRDKLKISNKDWFDFIQNKRYL

SEQ ID NO: 165 - DNA, 3789 bp, synthetic construct
  source 1..3789: mol_type = other DNA
atgaataacggtaccaataactttcaaaattttatcgggatctcctcgttgcaaaaaactcttcgtaatgctttaatcccgactgagacaacacagcagttcatcgttaaaaacggcatcattaaagaagatgagctgcgcggcgagaaccgtcagattttaaaggacatcatggacgactattaccgtgggttcatctcagaaacattaagcagcatcgatgatatcgactggacctcactgtttgagaagatggagattcaacttaagaatggagacaacaaagacactttaattaaggagcagacggaatatcgtaaagctatccataaaaaatttgcaaacgatgaccgtttcaaaaatatgttttccgcaaaattgattagcgacattttacctgaattcgtaatccataacaacaactattccgcatctgaaaaagaggagaagacccaagttatcaaacttttttcacgtttcgcgacatcttttaaagactactttaagaatcgtgcgaattgtttcagtgcagatgatatttcgtctagttcatgtcaccgtatcgtgaatgacaacgctgagattttcttttctaatgcgttggtgtatcgccgcatcgtaaagtccttgtcgaatgatgatatcaacaaaattagtggtgacatgaaagactccctgaaagaaatgtcattagaggagatttacagctacgaaaaatacggagagttcatcactcaggaaggtatctccttttacaacgatatttgcggcaaagttaatagtttcatgaatctgtattgtcagaagaataaggaaaacaagaatctgtacaagttacaaaagcttcataaacagatcttgtgcatcgccgacacgtcttatgaagtcccgtataaatttgaaagcgacgaagaagtatatcagagtgtgaatggattcttggacaatatctcatcaaaacacattgttgaacgtttgcgcaaaatcggcgacaactataacggatacaacttggataaaatttatatcgtatcaaaattttatgaatcagtatcccaaaagacttaccgtgattgggagactattaatacggcgttagaaatccattacaacaacattctgccgggtaacggtaaatcgaaagcggacaaagtgaagaaggcggttaagaacgatcttcagaagtctatcacggagattaatgagctggtttccaattacaagttgtgctcggatgataacatcaaagctgaaacctatatccatgaaatttctcatattcttaataacttcgaggcacaagaattaaaatataacccagaaattcatctggttgagagcgaacttaaagcttcagaattaaaaaatgttttggacgtaattatgaacgccttccattggtgcagcgtgtttatgacagaggagttagtagataaggataacaacttttatgcagaattggaagagatctatgatgagatctatccagtgatttcactgtataacttagtccgtaattacgtcactcagaagccgtactcaactaaaaagatcaagttaaattttggaattccgacattggcggatggttggagtaagtctaaggaatactcaaataacgctattatcttaatgcgtgacaacctgtattacttgggtattttcaatgccaaaaataagcccgataaaaaaatcattgaagggaatacttcagaaaataagggagattacaaaaaaatgatttataaccttttgccaggcccaaacaaaatgatccccaaggtgtttttgagtagtaagacgggagtagaaacatataagccatcagcgtacattcttgaagggtacaaacaaaataaacacatcaagagcagcaaggactttgacattacattttgtcatgacttaatcgactactttaaaaattgcattgccattcaccctgagtggaaaaattttggtttcgacttcagtgatacctctacctatgaagatatctctggtttttatcgtgaggtagaacttcagggttacaagatcgattggacgtacatttccgagaaagacattgatcttttacaagagaagggtcagctttacttatttcagatctacaataaagacttttcgaaaaaatccacgggcaacgacaaccttcatacaatgtacttaaagaacctgttctctgaagaaaacttgaaagatatcgtgcttaaattgaatggcgaggccgagatttttttccgtaaaagctcgattaagaatcccatcatccacaagaaaggcagcattctggtaaatcgtacctatgaagcggaggaaaaggaccaatttggtaatattcagattgtccgtaagaacatccctgaaaatatctatcaagaattatataaatatttcaacgataagtcggacaaggaacttagcgatgaagccgcgaagttgaaaaatgttgttggtcaccacgaagcagcaacaaacattgtgaaagactatcgctacacttacgataagtactttttacatatgcctattacgattaactttaaggcaaataagacaggttttatcaacgaccgtatcctgcaatatattgcaaaagagaaggacctgcatgtcattgggattgatcgcggtgaacgcaatctgatttacgtgagtgttattgatacctgcggtaatattgttgagcaaaagtcttttaatatcgttaatggtgtggactaccaaattaagcttaaacaacaggaaggtgcccgccagatcgcccgtaaggagtggaaggaaatcggaaaaattaaggaaatcaaagagggatatctgagcttggttattcatgaaatctcaaagatggttattaagtacaacgccatcatcgctatggaagacttatcgtatgggtttaaaaagggtcgtttcaaagttgagcgccaggtctaccaaaagtttgaaacgatgcttattaataaattaaactacttggttttcaaagatatctctattaccgagaatggaggtttactgaaaggataccagttaacgtatatccccgataagcttaaaaacgtgggccatcagtgtggctgtattttctatgtgcccgcggcatatacatcaaaaattgacccgacgacgggtttcgttaatatcttcaagttcaaagatctgacagttgatgcaaaacgcgaattcattaagaagttcgatagtattcgctatgactccgagaaaaatttgttttgcttcacttttgactacaataactttattactcagaatacagtcatgagtaaaagctcctggtcggtttacacgtacggggtacgcatcaaacgtcgttttgtgaatggtcgttttagtaatgagtcggatacaattgatattaccaaggatatggagaagactctggaaatgacagacatcaattggcgtgatggacatgatttgcgtcaggacattatcgactatgagattgtgcagcatattttcgaaatttttcgcctgacggtgcaaatgcgtaattccttaagcgaactggaagatcgcgactatgaccgcttaatttctcctgtgctgaatgagaacaacatcttctatgactcagcgaaagccggggacgctttgccaaaggatgcagatgctaacggtgcatattgtattgctctgaaaggcctttacgagatcaaacaaattactgaaaactggaaggaagatggaaagttttcccgtgataaattgaagatctctaataaggactggtttgactttatccaaaataaacgttattta

SEQ ID NO: 166 - protein, 1263 aa, synthetic construct
MNNGTNNFQNFIGISSLQKTLRNALIPTETTQQFIVKNGIIKEDELRGENRQILKDIMDDYYRGFISETLSSIDDIDWTSLFEKMEIQLKNGDNKDTLIKEQTEYRKAIHKKFANDDRFKNMFSAKLISDILPEFVIHNNNYSASEKEEKTQVIKLFSRFATSFKDYFKNRANCFSADDISSSSCHRIVNDNAEIFFSNALVYRRIVKSLSNDDINKISGDMKDSLKEMSLEEIYSYEKYGEFITQEGISFYNDICGKVNSFMNLYCQKNKENKNLYKLQKLHKQILCIADTSYEVPYKFESDEEVYQSVNGFLDNISSKHIVERLRKIGDNYNGYNLDKIYIVSKFYESVSQKTYRDWETINTALEIHYNNILPGNGKSKADKVKKAVKNDLQKSITEINELVSNYKLCSDDNIKAETYIHEISHILNNFEAQELKYNPEIHLVESELKASELKNVLDVIMNAFHWCSVFMTEELVDKDNNFYAELEEIYDEIYPVISLYNLVRNYVTQKPYSTKKIKLNFGIPTLADGWSKSKEYSNNAIILMRDNLYYLGIFNAKNKPDKKIIEGNTSENKGDYKKMIYNLLPGPNKMIPKVFLSSKTGVETYKPSAYILEGYKQNKHIKSSKDFDITFCHDLIDYFKNCIAIHPEWKNFGFDFSDTSTYEDISGFYREVELQGYKIDWTYISEKDIDLLQEKGQLYLFQIYNKDFSKKSTGNDNLHTMYLKNLFSEENLKDIVLKLNGEAEIFFRKSSIKNPIIHKKGSILVNRTYEAEEKDQFGNIQIVRKNIPENIYQELYKYFNDKSDKELSDEAAKLKNVVGHHEAATNIVKDYRYTYDKYFLHMPITINFKANKTGFINDRILQYIAKEKDLHVIGIDRGERNLIYVSVIDTCGNIVEQKSFNIVNGVDYQIKLKQQEGARQIARKEWKEIGKIKEIKEGYLSLVIHEISKMVIKYNAIIAMEDLSYGFKKGRFKVERQVYQKFETMLINKLNYLVFKDISITENGGLLKGYQLTYIPDKLKNVGHQCGCIFYVPAAYTSKIDPTTGFVNIFKFKDLTVDAKREFIKKFDSIRYDSEKNLFCFTFDYNNFITQNTVMSKSSWSVYTYGVRIKRRFVNGRFSNESDTIDITKDMEKTLEMTDINWRDGHDLRQDIIDYEIVQHIFEIFRLTVQMRNSLSELEDRDYDRLISPVLNENNIFYDSAKAGDALPKDADANGAYCIALKGLYEIKQITENWKEDGKFSRDKLKISNKDWFDFIQNKRYL

SEQ ID NO: 167 - DNA, 3789 bp, synthetic construct
  source 1..3789: mol_type = other DNA
atgaataacggtaccaataactttcaaaattttatcgggatctcctcgttgcaaaaaactcttcgtaatgctttaatcccgactgagacaacacagcagttcatcgttaaaaacggcatcattaaagaagatgagctgcgcggcgagaaccgtcagattttaaaggacatcatggacgactattaccgtgggttcatctcagaaacattaagcagcatcgatgatatcgactggacctcactgtttgagaagatggagattcaacttaagaatggagacaacaaagacactttaattaaggagcagacggaatatcgtaaagctatccataaaaaatttgcaaacgatgaccgtttcaaaaatatgttttccgcaaaattgattagcgacattttacctgaattcgtaatccataacaacaactattccgcatctgaaaaagaggagaagacccaagttatcaaacttttttcacgtttcgcgacatcttttaaagactactttaagaatcgtgcgaattgtttcagtgcagatgatatttcgtctagttcatgtcaccgtatcgtgaatgacaacgctgagattttcttttctaatgcgttggtgtatcgccgcatcgtaaagtccttgtcgaatgatgatatcaacaaaattagtggtgacatgaaagactccctgaaagaaatgtcattagaggagatttacagctacgaaaaatacggagagttcatcactcaggaaggtatctccttttacaacgatatttgcggcaaagttaatagtttcatgaatctgtattgtcagaagaataaggaaaacaagaatctgtacaagttacaaaagcttcataaacagatcttgtgcatcgccgacacgtcttatgaagtcccgtataaatttgaaagcgacgaagaagtatatcagagtgtgaatggattcttggacaatatctcatcaaaacacattgttgaacgtttgcgcaaaatcggcgacaactataacggatacaacttggataaaatttatatcgtatcaaaattttatgaatcagtatcccaaaagacttaccgtgattgggagactattaatacggcgttagaaatccattacaacaacattctgccgggtaacggtaaatcgaaagcggacaaagtgaagaaggcggttaagaacgatcttcagaagtctatcacggagattaatgagctggtttccaattacaagttgtgctcggatgataacatcaaagctgaaacctatatccatgaaatttctcatattcttaataacttcgaggcacaagaattaaaatataacccagaaattcatctggttgagagcgaacttaaagcttcagaattaaaaaatgttttggacgtaattatgaacgccttccattggtgcagcgtgtttatgacagaggagttagtagataaggataacaacttttatgcagaattggaagagatctatgatgagatctatccagtgatttcactgtataacttagtccgtaattacgtcactcagaagccgtactcaactaaaaagatcaagttaaattttggaattccgacattggcggatggttggagtaagtctaaggaatactcaaataacgctattatcttaatgcgtgacaacctgtattacttgggtattttcaatgccaaaaataagcccgataaaaaaatcattgaagggaatacttcagaaaataagggagattacaaaaaaatgatttataaccttttgccaggcccaaacaaaatgatccccaaggtgtttttgagtagtaagacgggagtagaaacatataagccatcagcgtacattcttgaagggtacaaacaaaataaacacatcaagagcagcaaggactttgacattacattttgtcatgacttaatcgactactttaaaaattgcattgccattcaccctgagtggaaaaattttggtttcgacttcagtgatacctctacctatgaagatatctctggtttttatcgtgaggtagaacttcagggttacaagatcgattggacgtacatttccgagaaagacattgatcttttacaagagaagggtcagctttacttatttcagatctacaataaagacttttcgaaaaaatccacgggcaacgacaaccttcatacaatgtacttaaagaacctgttctctgaagaaaacttgaaagatatcgtgcttaaattgaatggcgaggccgagatttttttccgtaaaagctcgattaagaatcccatcatccacaagaaaggcagcattctggtaaatcgtacctatgaagcggaggaaaaggaccaatttggtaatattcagattgtccgtaagaacatccctgaaaatatctatcaagaattatataaatatttcaacgataagtcggacaaggaacttagcgatgaagccgcgaagttgaaaaatgttgttggtcaccacgaagcagcaacaaacattgtgaaagactatcgctacacttacgataagtactttttacatatgcctattacgattaactttaaggcaaataagacaggttttatcaacgaccgtatcctgcaatatattgcaaaagagaaggacctgcatgtcattgggattgatcgcggtgaacgcaatctgatttacgtgagtgttattgatacctgcggtaatattgttgagcaaaagtcttttaatatcgttaatggtattgactaccaaattaagcttaaacaacaggaaggtgcccgccagatcgcccgtaaggagtggaaggaaatcggaaaaattaaggaaatcaaagagggatatctgagcttggttattcatgaaatctcaaagatggttattaagtacaacgccatcatcgctatggaagacttatcgtatgggtttaaaaagggtcgtttcaaagttgagcgccaggtctaccaaaagtttgaaacgatgcttattaataaattaaactacttggttttcaaagatatctctattaccgagaatggaggtttactgaaaggataccagttaacgtatatccccgataagcttaaaaacgtgggccatcagtgtggctgtattttctatgtgcccgcggcatatacatcaaaaattgacccgacgacgggtttcgttaatatcttcaagttcaaagatctgacagttgatgcaaaacgcgaattcattaagaagttcgatagtattcgctatgactccgagaaaaatttgttttgcttcacttttgactacaataactttattactcagaatacagtcatgagtaaaagctcctggtcggtttacacgtacggggtacgcatcaaacgtcgttttgtgaatggtcgttttagtaatgagtcggatacaattgatattaccaaggatatggagaagactctggaaatgacagacatcaattggcgtgatggacatgatttgcgtcaggacattatcgactatgagattgtgcagcatattttcgaaatttttcgcctgacggtgcaaatgcgtaattccttaagcgaactggaagatcgcgactatgaccgcttaatttctcctgtgctgaatgagaacaacatcttctatgactcagcgaaagccggggacgctttgccaaaggatgcagatgctaacggtgcatattgtattgctctgaaaggcctttacgagatcaaacaaattactgaaaactggaaggaagatggaaagttttcccgtgataaattgaagatctctaataaggactggtttgactttatccaaaataaacgttattta

SEQ ID NO: 168 - protein, 1263 aa, synthetic construct
MNNGTNNFQNFIGISSLQKTLRNALIPTETTQQFIVKNGIIKEDELRGENRQILKDIMDDYYRGFISETLSSIDDIDWTSLFEKMEIQLKNGDNKDTLIKEQTEYRKAIHKKFANDDRFKNMFSAKLISDILPEFVIHNNNYSASEKEEKTQVIKLFSRFATSFKDYFKNRANCFSADDISSSSCHRIVNDNAEIFFSNALVYRRIVKSLSNDDINKISGDMKDSLKEMSLEEIYSYEKYGEFITQEGISFYNDICGKVNSFMNLYCQKNKENKNLYKLQKLHKQILCIADTSYEVPYKFESDEEVYQSVNGFLDNISSKHIVERLRKIGDNYNGYNLDKIYIVSKFYESVSQKTYRDWETINTALEIHYNNILPGNGKSKADKVKKAVKNDLQKSITEINELVSNYKLCSDDNIKAETYIHEISHILNNFEAQELKYNPEIHLVESELKASELKNVLDVIMNAFHWCSVFMTEELVDKDNNFYAELEEIYDEIYPVISLYNLVRNYVTQKPYSTKKIKLNFGIPTLADGWSKSKEYSNNAIILMRDNLYYLGIFNAKNKPDKKIIEGNTSENKGDYKKMIYNLLPGPNKMIPKVFLSSKTGVETYKPSAYILEGYKQNKHIKSSKDFDITFCHDLIDYFKNCIAIHPEWKNFGFDFSDTSTYEDISGFYREVELQGYKIDWTYISEKDIDLLQEKGQLYLFQIYNKDFSKKSTGNDNLHTMYLKNLFSEENLKDIVLKLNGEAEIFFRKSSIKNPIIHKKGSILVNRTYEAEEKDQFGNIQIVRKNIPENIYQELYKYFNDKSDKELSDEAAKLKNVVGHHEAATNIVKDYRYTYDKYFLHMPITINFKANKTGFINDRILQYIAKEKDLHVIGIDRGERNLIYVSVIDTCGNIVEQKSFNIVNGIDYQIKLKQQEGARQIARKEWKEIGKIKEIKEGYLSLVIHEISKMVIKYNAIIAMEDLSYGFKKGRFKVERQVYQKFETMLINKLNYLVFKDISITENGGLLKGYQLTYIPDKLKNVGHQCGCIFYVPAAYTSKIDPTTGFVNIFKFKDLTVDAKREFIKKFDSIRYDSEKNLFCFTFDYNNFITQNTVMSKSSWSVYTYGVRIKRRFVNGRFSNESDTIDITKDMEKTLEMTDINWRDGHDLRQDIIDYEIVQHIFEIFRLTVQMRNSLSELEDRDYDRLISPVLNENNIFYDSAKAGDALPKDADANGAYCIALKGLYEIKQITENWKEDGKFSRDKLKISNKDWFDFIQNKRYL

SEQ ID NO: 169 - DNA, 3789 bp, synthetic construct
  source 1..3789: mol_type = other DNA
atgaataacggtaccaataactttcaaaattttatcgggatctcctcgttgcaaaaaactcttcgtaatgctttaatcccgactgagacaacacagcagttcatcgttaaaaacggcatcattaaagaagatgagctgcgcggcgagaaccgtcagattttaaaggacatcatggacgactattaccgtgggttcatctcagaaacattaagcagcatcgatgatatcgactggacctcactgtttgagaagatggagattcaacttaagaatggagacaacaaagacactttaattaaggagcagacggaatatcgtaaagctatccataaaaaatttgcaaacgatgaccgtttcaaaaatatgttttccgcaaaattgattagcgacattttacctgaattcgtaatccataacaacaactattccgcatctgaaaaagaggagaagacccaagttatcaaacttttttcacgtttcgcgacatcttttaaagactactttaagaatcgtgcgaattgtttcagtgcagatgatatttcgtctagttcatgtcaccgtatcgtgaatgacaacgctgagattttcttttctaatgcgttggtgtatcgccgcatcgtaaagtccttgtcgaatgatgatatcaacaaaattagtggtgacatgaaagactccctgaaagaaatgtcattagaggagatttacagctacgaaaaatacggagagttcatcactcaggaaggtatctccttttacaacgatatttgcggcaaagttaatagtttcatgaatctgtattgtcagaagaataaggaaaacaagaatctgtacaagttacaaaagcttcataaacagatcttgtgcatcgccgacacgtcttatgaagtcccgtataaatttgaaagcgacgaagaagtatatcagagtgtgaatggattcttggacaatatctcatcaaaacacattgttgaacgtttgcgcaaaatcggcgacaactataacggatacaacttggataaaatttatatcgtatcaaaattttatgaatcagtatcccaaaagacttaccgtgattgggagactattaatacggcgttagaaatccattacaacaacattctgccgggtaacggtaaatcgaaagcggacaaagtgaagaaggcggttaagaacgatcttcagaagtctatcacggagattaatgagctggtttccaattacaagttgtgctcggatgataacatcaaagctgaaacctatatccatgaaatttctcatattcttaataacttcgaggcacaagaattaaaatataacccagaaattcatctggttgagagcgaacttaaagcttcagaattaaaaaatgttttggacgtaattatgaacgccttccattggtgcagcgtgtttatgacagaggagttagtagataaggataacaacttttatgcagaattggaagagatctatgatgagatctatccagtgatttcactgtataacttagtccgtaattacgtcactcagaagccgtactcaactaaaaagatcaagttaaattttggaattccgacattggcggatggttggagtaagtctaaggaatactcaaataacgctattatcttaatgcgtgacaacctgtattacttgggtattttcaatgccaaaaataagcccgataaaaaaatcattgaagggaatacttcagaaaataagggagattacaaaaaaatgatttataaccttttgccaggcccaaacaaaatgatccccaaggtgtttttgagtagtaagacgggagtagaaacatataagccatcagcgtacattcttgaagggtacaaacaaaataaacacatcaagagcagcaaggactttgacattacattttgtcatgacttaatcgactactttaaaaattgcattgccattcaccctgagtggaaaaattttggtttcgacttcagtgatacctctacctatgaagatatctctggtttttatcgtgaggtagaacttcagggttacaagatcgattggacgtacatttccgagaaagacattgatcttttacaagagaagggtcagctttacttatttcagatctacaataaagacttttcgaaaaaatccacgggcaacgacaaccttcatacaatgtacttaaagaacctgttctctgaagaaaacttgaaagatatcgtgcttaaattgaatggcgaggccgagatttttttccgtaaaagctcgattaagaatcccatcatccacaagaaaggcagcattctggtaaatcgtacctatgaagcggaggaaaaggaccaatttggtaatattcagattgtccgtaagaacatccctgaaaatatctatcaagaattatataaatatttcaacgataagtcggacaaggaacttagcgatgaagccgcgaagttgaaaaatgttgttggtcaccacgaagcagcaacaaacattgtgaaagactatcgctacacttacgataagtactttttacatatgcctattacgattaactttaaggcaaataagacaggttttatcaacgaccgtatcctgcaatatattgcaaaagagaaggacctgcatgtcattgggattgatcgcggtgaacgcaatctgatttacgtgagtgttattgatacctgcggtaatattgttgagcaaaagtcttttaatatcgttaatggttacgactaccaaattaagcttaaacaatatgaaggtgcccgccagatcgcccgtaaggagtggaaggaaatcggaaaaattaaggaaatcaaagagggatatctgagcttggttattcatgaaatctcaaagatggttattaagtacaacgccatcatcgctatggaagacttatcgtatgggtttaaaaagggtcgtttcaaagttgagcgccaggtctaccaaaagtttgaaacgatgcttattaataaattaaactacttggttttcaaagatatctctattaccgagaatggaggtttactgaaaggataccagttaacgtatatccccgataagcttaaaaacgtgggccatcagtgtggctgtattttctatgtgcccgcggcatatacatcaaaaattgacccgacgacgggtttcgttaatatcttcaagttcaaagatctgacagttgatgcaaaacgcgaattcattaagaagttcgatagtattcgctatgactccgagaaaaatttgttttgcttcacttttgactacaataactttattactcagaatacagtcatgagtaaaagctcctggtcggtttacacgtacggggtacgcatcaaacgtcgttttgtgaatggtcgttttagtaatgagtcggatacaattgatattaccaaggatatggagaagactctggaaatgacagacatcaattggcgtgatggacatgatttgcgtcaggacattatcgactatgagattgtgcagcatattttcgaaatttttcgcctgacggtgcaaatgcgtaattccttaagcgaactggaagatcgcgactatgaccgcttaatttctcctgtgctgaatgagaacaacatcttctatgactcagcgaaagccggggacgctttgccaaaggatgcagatgctaacggtgcatattgtattgctctgaaaggcctttacgagatcaaacaaattactgaaaactggaaggaagatggaaagttttcccgtgataaattgaagatctctaataaggactggtttgactttatccaaaataaacgttattta

SEQ ID NO: 170 - protein, 1263 aa, synthetic construct
MNNGTNNFQNFIGISSLQKTLRNALIPTETTQQFIVKNGIIKEDELRGENRQILKDIMDDYYRGFISETLSSIDDIDWTSLFEKMEIQLKNGDNKDTLIKEQTEYRKAIHKKFANDDRFKNMFSAKLISDILPEFVIHNNNYSASEKEEKTQVIKLFSRFATSFKDYFKNRANCFSADDISSSSCHRIVNDNAEIFFSNALVYRRIVKSLSNDDINKISGDMKDSLKEMSLEEIYSYEKYGEFITQEGISFYNDICGKVNSFMNLYCQKNKENKNLYKLQKLHKQILCIADTSYEVPYKFESDEEVYQSVNGFLDNISSKHIVERLRKIGDNYNGYNLDKIYIVSKFYESVSQKTYRDWETINTALEIHYNNILPGNGKSKADKVKKAVKNDLQKSITEINELVSNYKLCSDDNIKAETYIHEISHILNNFEAQELKYNPEIHLVESELKASELKNVLDVIMNAFHWCSVFMTEELVDKDNNFYAELEEIYDEIYPVISLYNLVRNYVTQKPYSTKKIKLNFGIPTLADGWSKSKEYSNNAIILMRDNLYYLGIFNAKNKPDKKIIEGNTSENKGDYKKMIYNLLPGPNKMIPKVFLSSKTGVETYKPSAYILEGYKQNKHIKSSKDFDITFCHDLIDYFKNCIAIHPEWKNFGFDFSDTSTYEDISGFYREVELQGYKIDWTYISEKDIDLLQEKGQLYLFQIYNKDFSKKSTGNDNLHTMYLKNLFSEENLKDIVLKLNGEAEIFFRKSSIKNPIIHKKGSILVNRTYEAEEKDQFGNIQIVRKNIPENIYQELYKYFNDKSDKELSDEAAKLKNVVGHHEAATNIVKDYRYTYDKYFLHMPITINFKANKTGFINDRILQYIAKEKDLHVIGIDRGERNLIYVSVIDTCGNIVEQKSFNIVNGYDYQIKLKQYEGARQIARKEWKEIGKIKEIKEGYLSLVIHEISKMVIKYNAIIAMEDLSYGFKKGRFKVERQVYQKFETMLINKLNYLVFKDISITENGGLLKGYQLTYIPDKLKNVGHQCGCIFYVPAAYTSKIDPTTGFVNIFKFKDLTVDAKREFIKKFDSIRYDSEKNLFCFTFDYNNFITQNTVMSKSSWSVYTYGVRIKRRFVNGRFSNESDTIDITKDMEKTLEMTDINWRDGHDLRQDIIDYEIVQHIFEIFRLTVQMRNSLSELEDRDYDRLISPVLNENNIFYDSAKAGDALPKDADANGAYCIALKGLYEIKQITENWKEDGKFSRDKLKISNKDWFDFIQNKRYL

SEQ ID NO: 171 - DNA, 3789 bp, synthetic construct
  source 1..3789: mol_type = other DNA
atgaataacggtaccaataactttcaaaattttatcgggatctcctcgttgcaaaaaactcttcgtaatgctttaatcccgactgagacaacacagcagttcatcgttaaaaacggcatcattaaagaagatgagctgcgcggcgagaaccgtcagattttaaaggacatcatggacgactattaccgtgggttcatctcagaaacattaagcagcatcgatgatatcgactggacctcactgtttgagaagatggagattcaacttaagaatggagacaacaaagacactttaattaaggagcagacggaatatcgtaaagctatccataaaaaatttgcaaacgatgaccgtttcaaaaatatgttttccgcaaaattgattagcgacattttacctgaattcgtaatccataacaacaactattccgcatctgaaaaagaggagaagacccaagttatcaaacttttttcacgtttcgcgacatcttttaaagactactttaagaatcgtgcgaattgtttcagtgcagatgatatttcgtctagttcatgtcaccgtatcgtgaatgacaacgctgagattttcttttctaatgcgttggtgtatcgccgcatcgtaaagtccttgtcgaatgatgatatcaacaaaattagtggtgacatgaaagactccctgaaagaaatgtcattagaggagatttacagctacgaaaaatacggagagttcatcactcaggaaggtatctccttttacaacgatatttgcggcaaagttaatagtttcatgaatctgtattgtcagaagaataaggaaaacaagaatctgtacaagttacaaaagcttcataaacagatcttgtgcatcgccgacacgtcttatgaagtcccgtataaatttgaaagcgacgaagaagtatatcagagtgtgaatggattcttggacaatatctcatcaaaacacattgttgaacgtttgcgcaaaatcggcgacaactataacggatacaacttggataaaatttatatcgtatcaaaattttatgaatcagtatcccaaaagacttaccgtgattgggagactattaatacggcgttagaaatccattacaacaacattctgccgggtaacggtaaatcgaaagcggacaaagtgaagaaggcggttaagaacgatcttcagaagtctatcacggagattaatgagctggtttccaattacaagttgtgctcggatgataacatcaaagctgaaacctatatccatgaaatttctcatattcttaataacttcgaggcacaagaattaaaatataacccagaaattcatctggttgagagcgaacttaaagcttcagaattaaaaaatgttttggacgtaattatgaacgccttccattggtgcagcgtgtttatgacagaggagttagtagataaggataacaacttttatgcagaattggaagagatctatgatgagatctatccagtgatttcactgtataacttagtccgtaattacgtcactcagaagccgtactcaactaaaaagatcaagttaaattttggaattccgacattggcggatggttggagtaagtctaaggaatactcaaataacgctattatcttaatgcgtgacaacctgtattacttgggtattttcaatgccaaaaataagcccgataaaaaaatcattgaagggaatacttcagaaaataagggagattacaaaaaaatgatttataaccttttgccaggcccaaacaaaatgatccccaaggtgtttttgagtagtaagacgggagtagaaacatataagccatcagcgtacattcttgaagggtacaaacaaaataaacacatcaagagcagcaaggactttgacattacattttgtcatgacttaatcgactactttaaaaattgcattgccattcaccctgagtggaaaaattttggtttcgacttcagtgatacctctacctatgaagatatctctggtttttatcgtgaggtagaacttcagggttacaagatcgattggacgtacatttccgagaaagacattgatcttttacaagagaagggtcagctttacttatttcagatctacaataaagacttttcgaaaaaatccacgggcaacgacaaccttcatacaatgtacttaaagaacctgttctctgaagaaaacttgaaagatatcgtgcttaaattgaatggcgaggccgagatttttttccgtaaaagctcgattaagaatcccatcatccacaagaaaggcagcattctggtaaatcgtacctatgaagcggaggaaaaggaccaatttggtaatattcagattgtccgtaagaacatccctgaaaatatctatcaagaattatataaatatttcaacgataagtcggacaaggaacttagcgatgaagccgcgaagttgaaaaatgttgttggtcaccacgaagcagcaacaaacattgtgaaagactatcgctacacttacgataagtactttttacatatgcctattacgattaactttaaggcaaataagacaggttttatcaacgaccgtatcctgcaatatattgcaaaagagaaggacctgcatgtcattgggattgatcgcggtgaacgcaatctgatttacgtgagtgttattgatacctgcggtaatattgttgagcaaaagtcttttaatatcgttaatggttacgactaccaaattaagcttaaacaacaggaaggtgcccgccagatcgcccgtaaggagtggaaggaaatcggaaaaattaagcgtatcaaagagggatatctgagcttggttattcatgaaatctcaaagatggttattaagtacaacgccatcatcgctatggaagacttatcgtatgggtttaaaaagggtcgtttcaaagttgagcgccaggtctaccaaaagtttgaaacgatgcttattaataaattaaactacttggttttcaaagatatctctattaccgagaatggaggtttactgaaaggataccagttaacgtatatccccgataagcttaaaaacgtgggccatcagtgtggctgtattttctatgtgcccgcggcatatacatcaaaaattgacccgacgacgggtttcgttaatatcttcaagttcaaagatctgacagttgatgcaaaacgcgaattcattaagaagttcgatagtattcgctatgactccgagaaaaatttgttttgcttcacttttgactacaataactttattactcagaatacagtcatgagtaaaagctcctggtcggtttacacgtacggggtacgcatcaaacgtcgttttgtgaatggtcgttttagtaatgagtcggatacaattgatattaccaaggatatggagaagactctggaaatgacagacatcaattggcgtgatggacatgatttgcgtcaggacattatcgactatgagattgtgcagcatattttcgaaatttttcgcctgacggtgcaaatgcgtaattccttaagcgaactggaagatcgcgactatgaccgcttaatttctcctgtgctgaatgagaacaacatcttctatgactcagcgaaagccggggacgctttgccaaaggatgcagatgctaacggtgcatattgtattgctctgaaaggcctttacgagatcaaacaaattactgaaaactggaaggaagatggaaagttttcccgtgataaattgaagatctctaataaggactggtttgactttatccaaaataaacgttattta

SEQ ID NO: 172 - protein, 1263 aa, synthetic construct
MNNGTNNFQNFIGISSLQKTLRNALIPTETTQQFIVKNGIIKEDELRGENRQILKDIMDDYYRGFISETLSSIDDIDWTSLFEKMEIQLKNGDNKDTLIKEQTEYRKAIHKKFANDDRFKNMFSAKLISDILPEFVIHNNNYSASEKEEKTQVIKLFSRFATSFKDYFKNRANCFSADDISSSSCHRIVNDNAEIFFSNALVYRRIVKSLSNDDINKISGDMKDSLKEMSLEEIYSYEKYGEFITQEGISFYNDICGKVNSFMNLYCQKNKENKNLYKLQKLHKQILCIADTSYEVPYKFESDEEVYQSVNGFLDNISSKHIVERLRKIGDNYNGYNLDKIYIVSKFYESVSQKTYRDWETINTALEIHYNNILPGNGKSKADKVKKAVKNDLQKSITEINELVSNYKLCSDDNIKAETYIHEISHILNNFEAQELKYNPEIHLVESELKASELKNVLDVIMNAFHWCSVFMTEELVDKDNNFYAELEEIYDEIYPVISLYNLVRNYVTQKPYSTKKIKLNFGIPTLADGWSKSKEYSNNAIILMRDNLYYLGIFNAKNKPDKKIIEGNTSENKGDYKKMIYNLLPGPNKMIPKVFLSSKTGVETYKPSAYILEGYKQNKHIKSSKDFDITFCHDLIDYFKNCIAIHPEWKNFGFDFSDTSTYEDISGFYREVELQGYKIDWTYISEKDIDLLQEKGQLYLFQIYNKDFSKKSTGNDNLHTMYLKNLFSEENLKDIVLKLNGEAEIFFRKSSIKNPIIHKKGSILVNRTYEAEEKDQFGNIQIVRKNIPENIYQELYKYFNDKSDKELSDEAAKLKNVVGHHEAATNIVKDYRYTYDKYFLHMPITINFKANKTGFINDRILQYIAKEKDLHVIGIDRGERNLIYVSVIDTCGNIVEQKSFNIVNGYDYQIKLKQQEGARQIARKEWKEIGKIKRIKEGYLSLVIHEISKMVIKYNAIIAMEDLSYGFKKGRFKVERQVYQKFETMLINKLNYLVFKDISITENGGLLKGYQLTYIPDKLKNVGHQCGCIFYVPAAYTSKIDPTTGFVNIFKFKDLTVDAKREFIKKFDSIRYDSEKNLFCFTFDYNNFITQNTVMSKSSWSVYTYGVRIKRRFVNGRFSNESDTIDITKDMEKTLEMTDINWRDGHDLRQDIIDYEIVQHIFEIFRLTVQMRNSLSELEDRDYDRLISPVLNENNIFYDSAKAGDALPKDADANGAYCIALKGLYEIKQITENWKEDGKFSRDKLKISNKDWFDFIQNKRYL

SEQ ID NO: 173 - DNA, 3789 bp, synthetic construct
  source 1..3789: mol_type = other DNA
atgaataacggtaccaataactttcaaaattttatcgggatctcctcgttgcaaaaaactcttcgtaatgctttaatcccgactgagacaacacagcagttcatcgttaaaaacggcatcattaaagaagatgagctgcgcggcgagaaccgtcagattttaaaggacatcatggacgactattaccgtgggttcatctcagaaacattaagcagcatcgatgatatcgactggacctcactgtttgagaagatggagattcaacttaagaatggagacaacaaagacactttaattaaggagcagacggaatatcgtaaagctatccataaaaaatttgcaaacgatgaccgtttcaaaaatatgttttccgcaaaattgattagcgacattttacctgaattcgtaatccataacaacaactattccgcatctgaaaaagaggagaagacccaagttatcaaacttttttcacgtttcgcgacatcttttaaagactactttaagaatcgtgcgaattgtttcagtgcagatgatatttcgtctagttcatgtcaccgtatcgtgaatgacaacgctgagattttcttttctaatgcgttggtgtatcgccgcatcgtaaagtccttgtcgaatgatgatatcaacaaaattagtggtgacatgaaagactccctgaaagaaatgtcattagaggagatttacagctacgaaaaatacggagagttcatcactcaggaaggtatctccttttacaacgatatttgcggcaaagttaatagtttcatgaatctgtattgtcagaagaataaggaaaacaagaatctgtacaagttacaaaagcttcataaacagatcttgtgcatcgccgacacgtcttatgaagtcccgtataaatttgaaagcgacgaagaagtatatcagagtgtgaatggattcttggacaatatctcatcaaaacacattgttgaacgtttgcgcaaaatcggcgacaactataacggatacaacttggataaaatttatatcgtatcaaaattttatgaatcagtatcccaaaagacttaccgtgattgggagactattaatacggcgttagaaatccattacaacaacattctgccgggtaacggtaaatcgaaagcggacaaagtgaagaaggcggttaagaacgatcttcagaagtctatcacggagattaatgagctggtttccaattacaagttgtgctcggatgataacatcaaagctgaaacctatatccatgaaatttctcatattcttaataacttcgaggcacaagaattaaaatataacccagaaattcatctggttgagagcgaacttaaagcttcagaattaaaaaatgttttggacgtaattatgaacgccttccattggtgcagcgtgtttatgacagaggagttagtagataaggataacaacttttatgcagaattggaagagatctatgatgagatctatccagtgatttcactgtataacttagtccgtaattacgtcactcagaagccgtactcaactaaaaagatcaagttaaattttggaattccgacattggcggatggttggagtaagtctaaggaatactcaaataacgctattatcttaatgcgtgacaacctgtattacttgggtattttcaatgccaaaaataagcccgataaaaaaatcattgaagggaatacttcagaaaataagggagattacaaaaaaatgatttataaccttttgccaggcccaaacaaaatgatccccaaggtgtttttgagtagtaagacgggagtagaaacatataagccatcagcgtacattcttgaagggtacaaacaaaataaacacatcaagagcagcaaggactttgacattacattttgtcatgacttaatcgactactttaaaaattgcattgccattcaccctgagtggaaaaattttggtttcgacttcagtgatacctctacctatgaagatatctctggtttttatcgtgaggtagaacttcagggttacaagatcgattggacgtacatttccgagaaagacattgatcttttacaagagaagggtcagctttacttatttcagatctacaataaagacttttcgaaaaaatccacgggcaacgacaaccttcatacaatgtacttaaagaacctgttctctgaagaaaacttgaaagatatcgtgcttaaattgaatggcgaggccgagatttttttccgtaaaagctcgattaagaatcccatcatccacaagaaaggcagcattctggtaaatcgtacctatgaagcggaggaaaaggaccaatttggtaatattcagattgtccgtaagaacatccctgaaaatatctatcaagaattatataaatatttcaacgataagtcggacaaggaacttagcgatgaagccgcgaagttgaaaaatgttgttggtcaccacgaagcagcaacaaacattgtgaaagactatcgctacacttacgataagtactttttacatatgcctattacgattaactttaaggcaaataagacaggttttatcaacgaccgtatcctgcaatatattgcaaaagagaaggacctgcatgtcattgggattgatcgcggtgaacgcaatctgatttacgtgagtgttattgatacctgcggtaatattgttgagcaaaagtcttttaatatcgttaatggttacgactaccaaattaagcttaaacaacaggaaggtgcccgccagatcgcccgtaaggagtggaaggaaatcggaaaaattaaggaacgtaaagagggatatctgagcttggttattcatgaaatctcaaagatggttattaagtacaacgccatcatcgctatggaagacttatcgtatgggtttaaaaagggtcgtttcaaagttgagcgccaggtctaccaaaagtttgaaacgatgcttattaataaattaaactacttggttttcaaagatatctctattaccgagaatggaggtttactgaaaggataccagttaacgtatatccccgataagcttaaaaacgtgggccatcagtgtggctgtattttctatgtgcccgcggcatatacatcaaaaattgacccgacgacgggtttcgttaatatcttcaagttcaaagatctgacagttgatgcaaaacgcgaattcattaagaagttcgatagtattcgctatgactccgagaaaaatttgttttgcttcacttttgactacaataactttattactcagaatacagtcatgagtaaaagctcctggtcggtttacacgtacggggtacgcatcaaacgtcgttttgtgaatggtcgttttagtaatgagtcggatacaattgatattaccaaggatatggagaagactctggaaatgacagacatcaattggcgtgatggacatgatttgcgtcaggacattatcgactatgagattgtgcagcatattttcgaaatttttcgcctgacggtgcaaatgcgtaattccttaagcgaactggaagatcgcgactatgaccgcttaatttctcctgtgctgaatgagaacaacatcttctatgactcagcgaaagccggggacgctttgccaaaggatgcagatgctaacggtgcatattgtattgctctgaaaggcctttacgagatcaaacaaattactgaaaactggaaggaagatggaaagttttcccgtgataaattgaagatctctaataaggactggtttgactttatccaaaataaacgttattta

SEQ ID NO: 174 - protein, 1263 aa, synthetic construct
MNNGTNNFQNFIGISSLQKTLRNALIPTETTQQFIVKNGIIKEDELRGENRQILKDIMDDYYRGFISETLSSIDDIDWTSLFEKMEIQLKNGDNKDTLIKEQTEYRKAIHKKFANDDRFKNMFSAKLISDILPEFVIHNNNYSASEKEEKTQVIKLFSRFATSFKDYFKNRANCFSADDISSSSCHRIVNDNAEIFFSNALVYRRIVKSLSNDDINKISGDMKDSLKEMSLEEIYSYEKYGEFITQEGISFYNDICGKVNSFMNLYCQKNKENKNLYKLQKLHKQILCIADTSYEVPYKFESDEEVYQSVNGFLDNISSKHIVERLRKIGDNYNGYNLDKIYIVSKFYESVSQKTYRDWETINTALEIHYNNILPGNGKSKADKVKKAVKNDLQKSITEINELVSNYKLCSDDNIKAETYIHEISHILNNFEAQELKYNPEIHLVESELKASELKNVLDVIMNAFHWCSVFMTEELVDKDNNFYAELEEIYDEIYPVISLYNLVRNYVTQKPYSTKKIKLNFGIPTLADGWSKSKEYSNNAIILMRDNLYYLGIFNAKNKPDKKIIEGNTSENKGDYKKMIYNLLPGPNKMIPKVFLSSKTGVETYKPSAYILEGYKQNKHIKSSKDFDITFCHDLIDYFKNCIAIHPEWKNFGFDFSDTSTYEDISGFYREVELQGYKIDWTYISEKDIDLLQEKGQLYLFQIYNKDFSKKSTGNDNLHTMYLKNLFSEENLKDIVLKLNGEAEIFFRKSSIKNPIIHKKGSILVNRTYEAEEKDQFGNIQIVRKNIPENIYQELYKYFNDKSDKELSDEAAKLKNVVGHHEAATNIVKDYRYTYDKYFLHMPITINFKANKTGFINDRILQYIAKEKDLHVIGIDRGERNLIYVSVIDTCGNIVEQKSFNIVNGYDYQIKLKQQEGARQIARKEWKEIGKIKERKEGYLSLVIHEISKMVIKYNAIIAMEDLSYGFKKGRFKVERQVYQKFETMLINKLNYLVFKDISITENGGLLKGYQLTYIPDKLKNVGHQCGCIFYVPAAYTSKIDPTTGFVNIFKFKDLTVDAKREFIKKFDSIRYDSEKNLFCFTFDYNNFITQNTVMSKSSWSVYTYGVRIKRRFVNGRFSNESDTIDITKDMEKTLEMTDINWRDGHDLRQDIIDYEIVQHIFEIFRLTVQMRNSLSELEDRDYDRLISPVLNENNIFYDSAKAGDALPKDADANGAYCIALKGLYEIKQITENWKEDGKFSRDKLKISNKDWFDFIQNKRYL

SEQ ID NO: 175 - DNA, 3789 bp, synthetic construct
  source 1..3789: mol_type = other DNA
atgaataacggtaccaataactttcaaaattttatcgggatctcctcgttgcaaaaaactcttcgtaatgctttaatcccgactgagacaacacagcagttcatcgttaaaaacggcatcattaaagaagatgagctgcgcggcgagaaccgtcagattttaaaggacatcatggacgactattaccgtgggttcatctcagaaacattaagcagcatcgatgatatcgactggacctcactgtttgagaagatggagattcaacttaagaatggagacaacaaagacactttaattaaggagcagacggaatatcgtaaagctatccataaaaaatttgcaaacgatgaccgtttcaaaaatatgttttccgcaaaattgattagcgacattttacctgaattcgtaatccataacaacaactattccgcatctgaaaaagaggagaagacccaagttatcaaacttttttcacgtttcgcgacatcttttaaagactactttaagaatcgtgcgaattgtttcagtgcagatgatatttcgtctagttcatgtcaccgtatcgtgaatgacaacgctgagattttcttttctaatgcgttggtgtatcgccgcatcgtaaagtccttgtcgaatgatgatatcaacaaaattagtggtgacatgaaagactccctgaaagaaatgtcattagaggagatttacagctacgaaaaatacggagagttcatcactcaggaaggtatctccttttacaacgatatttgcggcaaagttaatagtttcatgaatctgtattgtcagaagaataaggaaaacaagaatctgtacaagttacaaaagcttcataaacagatcttgtgcatcgccgacacgtcttatgaagtcccgtataaatttgaaagcgacgaagaagtatatcagagtgtgaatggattcttggacaatatctcatcaaaacacattgttgaacgtttgcgcaaaatcggcgacaactataacggatacaacttggataaaatttatatcgtatcaaaattttatgaatcagtatcccaaaagacttaccgtgattgggagactattaatacggcgttagaaatccattacaacaacattctgccgggtaacggtaaatcgaaagcggacaaagtgaagaaggcggttaagaacgatcttcagaagtctatcacggagattaatgagctggtttccaattacaagttgtgctcggatgataacatcaaagctgaaacctatatccatgaaatttctcatattcttaataacttcgaggcacaagaattaaaatataacccagaaattcatctggttgagagcgaacttaaagcttcagaattaaaaaatgttttggacgtaattatgaacgccttccattggtgcagcgtgtttatgacagaggagttagtagataaggataacaacttttatgcagaattggaagagatctatgatgagatctatccagtgatttcactgtataacttagtccgtaattacgtcactcagaagccgtactcaactaaaaagatcaagttaaattttggaattccgacattggcggatggttggagtaagtctaaggaatactcaaataacgctattatcttaatgcgtgacaacctgtattacttgggtattttcaatgccaaaaataagcccgataaaaaaatcattgaagggaatacttcagaaaataagggagattacaaaaaaatgatttataaccttttgccaggcccaaacaaaatgatccccaaggtgtttttgagtagtaagacgggagtagaaacatataagccatcagcgtacattcttgaagggtacaaacaaaataaacacatcaagagcagcaaggactttgacattacattttgtcatgacttaatcgactactttaaaaattgcattgccattcaccctgagtggaaaaattttggtttcgacttcagtgatacctctacctatgaagatatctctggtttttatcgtgaggtagaacttcagggttacaagatcgattggacgtacatttccgagaaagacattgatcttttacaagagaagggtcagctttacttatttcagatctacaataaagacttttcgaaaaaatccacgggcaacgacaaccttcatacaatgtacttaaagaacctgttctctgaagaaaacttgaaagatatcgtgcttaaattgaatggcgaggccgagatttttttccgtaaaagctcgattaagaatcccatcatccacaagaaaggcagcattctggtaaatcgtacctatgaagcggaggaaaaggaccaatttggtaatattcagattgtccgtaagaacatccctgaaaatatctatcaagaattatataaatatttcaacgataagtcggacaaggaacttagcgatgaagccgcgaagttgaaaaatgttgttggtcaccacgaagcagcaacaaacattgtgaaagactatcgctacacttacgataagtactttttacatatgcctattacgattaactttaaggcaaataagacaggttttatcaacgaccgtatcctgcaatatattgcaaaagagaaggacctgcatgtcattgggattgatcgcggtgaacgcaatctgatttacgtgagtgttattgatacctgcggtaatattgttgagcaaaagtcttttaatatcgttaatggttacgactaccaaattaagcttaaacaacaggaaggtgcccgccagatcgcccgtaaggagtggaaggaaatcggaaaaattaaggaaatcaaagagggatatctgagcttggttattcatgaaatctcaaagatggttattaagtacaacgccatcatcgctatggaagacttatcgtatgggtttaaaaagggtcgtttcggcgttgagcgccaggtctaccaaaagtttgaaacgatgcttattaataaattaaactacttggttttcaaagatatctctattaccgagaatggaggtttactgaaaggataccagttaacgtatatccccgataagcttaaaaacgtgggccatcagtgtggctgtattttctatgtgcccgcggcatatacatcaaaaattgacccgacgacgggtttcgttaatatcttcaagttcaaagatctgacagttgatgcaaaacgcgaattcattaagaagttcgatagtattcgctatgactccgagaaaaatttgttttgcttcacttttgactacaataactttattactcagaatacagtcatgagtaaaagctcctggtcggtttacacgtacggggtacgcatcaaacgtcgttttgtgaatggtcgttttagtaatgagtcggatacaattgatattaccaaggatatggagaagactctggaaatgacagacatcaattggcgtgatggacatgatttgcgtcaggacattatcgactatgagattgtgcagcatattttcgaaatttttcgcctgacggtgcaaatgcgtaattccttaagcgaactggaagatcgcgactatgaccgcttaatttctcctgtgctgaatgagaacaacatcttctatgactcagcgaaagccggggacgctttgccaaaggatgcagatgctaacggtgcatattgtattgctctgaaaggcctttacgagatcaaacaaattactgaaaactggaaggaagatggaaagttttcccgtgataaattgaagatctctaataaggactggtttgactttatccaaaataaacgttattta

SEQ ID NO: 176 - protein, 1263 aa, synthetic construct
MNNGTNNFQNFIGISSLQKTLRNALIPTETTQQFIVKNGIIKEDELRGENRQILKDIMDDYYRGFISETLSSIDDIDWTSLFEKMEIQLKNGDNKDTLIKEQTEYRKAIHKKFANDDRFKNMFSAKLISDILPEFVIHNNNYSASEKEEKTQVIKLFSRFATSFKDYFKNRANCFSADDISSSSCHRIVNDNAEIFFSNALVYRRIVKSLSNDDINKISGDMKDSLKEMSLEEIYSYEKYGEFITQEGISFYNDICGKVNSFMNLYCQKNKENKNLYKLQKLHKQILCIADTSYEVPYKFESDEEVYQSVNGFLDNISSKHIVERLRKIGDNYNGYNLDKIYIVSKFYESVSQKTYRDWETINTALEIHYNNILPGNGKSKADKVKKAVKNDLQKSITEINELVSNYKLCSDDNIKAETYIHEISHILNNFEAQELKYNPEIHLVESELKASELKNVLDVIMNAFHWCSVFMTEELVDKDNNFYAELEEIYDEIYPVISLYNLVRNYVTQKPYSTKKIKLNFGIPTLADGWSKSKEYSNNAIILMRDNLYYLGIFNAKNKPDKKIIEGNTSENKGDYKKMIYNLLPGPNKMIPKVFLSSKTGVETYKPSAYILEGYKQNKHIKSSKDFDITFCHDLIDYFKNCIAIHPEWKNFGFDFSDTSTYEDISGFYREVELQGYKIDWTYISEKDIDLLQEKGQLYLFQIYNKDFSKKSTGNDNLHTMYLKNLFSEENLKDIVLKLNGEAEIFFRKSSIKNPIIHKKGSILVNRTYEAEEKDQFGNIQIVRKNIPENIYQELYKYFNDKSDKELSDEAAKLKNVVGHHEAATNIVKDYRYTYDKYFLHMPITINFKANKTGFINDRILQYIAKEKDLHVIGIDRGERNLIYVSVIDTCGNIVEQKSFNIVNGYDYQIKLKQQEGARQIARKEWKEIGKIKEIKEGYLSLVIHEISKMVIKYNAIIAMEDLSYGFKKGRFGVERQVYQKFETMLINKLNYLVFKDISITENGGLLKGYQLTYIPDKLKNVGHQCGCIFYVPAAYTSKIDPTTGFVNIFKFKDLTVDAKREFIKKFDSIRYDSEKNLFCFTFDYNNFITQNTVMSKSSWSVYTYGVRIKRRFVNGRFSNESDTIDITKDMEKTLEMTDINWRDGHDLRQDIIDYEIVQHIFEIFRLTVQMRNSLSELEDRDYDRLISPVLNENNIFYDSAKAGDALPKDADANGAYCIALKGLYEIKQITENWKEDGKFSRDKLKISNKDWFDFIQNKRYL

SEQ ID NO: 177 - DNA, 3789 bp, synthetic construct
  source 1..3789: mol_type = other DNA
atgaataacggtaccaataactttcaaaattttatcgggatctcctcgttgcaaaaaactcttcgtaatgctttaatcccgactgagacaacacagcagttcatcgttaaaaacggcatcattaaagaagatgagctgcgcggcgagaaccgtcagattttaaaggacatcatggacgactattaccgtgggttcatctcagaaacattaagcagcatcgatgatatcgactggacctcactgtttgagaagatggagattcaacttaagaatggagacaacaaagacactttaattaaggagcagacggaatatcgtaaagctatccataaaaaatttgcaaacgatgaccgtttcaaaaatatgttttccgcaaaattgattagcgacattttacctgaattcgtaatccataacaacaactattccgcatctgaaaaagaggagaagacccaagttatcaaacttttttcacgtttcgcgacatcttttaaagactactttaagaatcgtgcgaattgtttcagtgcagatgatatttcgtctagttcatgtcaccgtatcgtgaatgacaacgctgagattttcttttctaatgcgttggtgtatcgccgcatcgtaaagtccttgtcgaatgatgatatcaacaaaattagtggtgacatgaaagactccctgaaagaaatgtcattagaggagatttacagctacgaaaaatacggagagttcatcactcaggaaggtatctccttttacaacgatatttgcggcaaagttaatagtttcatgaatctgtattgtcagaagaataaggaaaacaagaatctgtacaagttacaaaagcttcataaacagatcttgtgcatcgccgacacgtcttatgaagtcccgtataaatttgaaagcgacgaagaagtatatcagagtgtgaatggattcttggacaatatctcatcaaaacacattgttgaacgtttgcgcaaaatcggcgacaactataacggatacaacttggataaaatttatatcgtatcaaaattttatgaatcagtatcccaaaagacttaccgtgattgggagactattaatacggcgttagaaatccattacaacaacattctgccgggtaacggtaaatcgaaagcggacaaagtgaagaaggcggttaagaacgatcttcagaagtctatcacggagattaatgagctggtttccaattacaagttgtgctcggatgataacatcaaagctgaaacctatatccatgaaatttctcatattcttaataacttcgaggcacaagaattaaaatataacccagaaattcatctggttgagagcgaacttaaagcttcagaattaaaaaatgttttggacgtaattatgaacgccttccattggtgcagcgtgtttatgacagaggagttagtagataaggataacaacttttatgcagaattggaagagatctatgatgagatctatccagtgatttcactgtataacttagtccgtaattacgtcactcagaagccgtactcaactaaaaagatcaagttaaattttggaattccgacattggcggatggttggagtaagtctaaggaatactcaaataacgctattatcttaatgcgtgacaacctgtattacttgggtattttcaatgccaaaaataagcccgataaaaaaatcattgaagggaatacttcagaaaataagggagattacaaaaaaatgatttataaccttttgccaggcccaaacaaaatgatccccaaggtgtttttgagtagtaagacgggagtagaaacatataagccatcagcgtacattcttgaagggtacaaacaaaataaacacatcaagagcagcaaggactttgacattacattttgtcatgacttaatcgactactttaaaaattgcattgccattcaccctgagtggaaaaattttggtttcgacttcagtgatacctctacctatgaagatatctctggtttttatcgtgaggtagaacttcagggttacaagatcgattggacgtacatttccgagaaagacattgatcttttacaagagaagggtcagctttacttatttcagatctacaataaagacttttcgaaaaaatccacgggcaacgacaaccttcatacaatgtacttaaagaacctgttctctgaagaaaacttgaaagatatcgtgcttaaattgaatggcgaggccgagatttttttccgtaaaagctcgattaagaatcccatcatccacaagaaaggcagcattctggtaaatcgtacctatgaagcggaggaaaaggaccaatttggtaatattcagattgtccgtaagaacatccctgaaaatatctatcaagaattatataaatatttcaacgataagtcggacaaggaacttagcgatgaagccgcgaagttgaaaaatgttgttggtcaccacgaagcagcaacaaacattgtgaaagactatcgctacacttacgataagtactttttacatatgcctattacgattaactttaaggcaaataagacaggttttatcaacgaccgtatcctgcaatatattgcaaaagagaaggacctgcatgtcattgggattgatcgcggtgaacgcaatctgatttacgtgagtgttattgatacctgcggtaatattgttgagcaaaagtcttttaatatcgttaatggttacgactaccaaattaagcttaaacaacaggaaggtgcccgccagatcgcccgtaaggagtggaaggaaatcggaaaaattaaggaaatcaaagagggatatctgagcttggttattcatgaaatctcaaagatggttattaagtacaacgccatcatcgctatggaagacttatcgtatgggtttaaaaagggtcgtttcaaagttgagcgccaggtctaccaaaagtttgaaacgatgcttattaataaattaaactacttggttttcaaagatatctctattaccgagaatggaggtttactgaaaggataccagttaacgtatatccccgatgtgcttaaaaacgtgggccatcagtgtggctgtattttctatgtgcccgcggcatatacatcaaaaattgacccgacgacgggtttcgttaatatcttcaagttcaaagatctgacagttgatgcaaaacgcgaattcattaagaagttcgatagtattcgctatgactccgagaaaaatttgttttgcttcacttttgactacaataactttattactcagaatacagtcatgagtaaaagctcctggtcggtttacacgtacggggtacgcatcaaacgtcgttttgtgaatggtcgttttagtaatgagtcggatacaattgatattaccaaggatatggagaagactctggaaatgacagacatcaattggcgtgatggacatgatttgcgtcaggacattatcgactatgagattgtgcagcatattttcgaaatttttcgcctgacggtgcaaatgcgtaattccttaagcgaactggaagatcgcgactatgaccgcttaatttctcctgtgctgaatgagaacaacatcttctatgactcagcgaaagccggggacgctttgccaaaggatgcagatgctaacggtgcatattgtattgctctgaaaggcctttacgagatcaaacaaattactgaaaactggaaggaagatggaaagttttcccgtgataaattgaagatctctaataaggactggtttgactttatccaaaataaacgttattta

SEQ ID NO: 178 - protein, 1263 aa, synthetic construct
MNNGTNNFQNFIGISSLQKTLRNALIPTETTQQFIVKNGIIKEDELRGENRQILKDIMDDYYRGFISETLSSIDDIDWTSLFEKMEIQLKNGDNKDTLIKEQTEYRKAIHKKFANDDRFKNMFSAKLISDILPEFVIHNNNYSASEKEEKTQVIKLFSRFATSFKDYFKNRANCFSADDISSSSCHRIVNDNAEIFFSNALVYRRIVKSLSNDDINKISGDMKDSLKEMSLEEIYSYEKYGEFITQEGISFYNDICGKVNSFMNLYCQKNKENKNLYKLQKLHKQILCIADTSYEVPYKFESDEEVYQSVNGFLDNISSKHIVERLRKIGDNYNGYNLDKIYIVSKFYESVSQKTYRDWETINTALEIHYNNILPGNGKSKADKVKKAVKNDLQKSITEINELVSNYKLCSDDNIKAETYIHEISHILNNFEAQELKYNPEIHLVESELKASELKNVLDVIMNAFHWCSVFMTEELVDKDNNFYAELEEIYDEIYPVISLYNLVRNYVTQKPYSTKKIKLNFGIPTLADGWSKSKEYSNNAIILMRDNLYYLGIFNAKNKPDKKIIEGNTSENKGDYKKMIYNLLPGPNKMIPKVFLSSKTGVETYKPSAYILEGYKQNKHIKSSKDFDITFCHDLIDYFKNCIAIHPEWKNFGFDFSDTSTYEDISGFYREVELQGYKIDWTYISEKDIDLLQEKGQLYLFQIYNKDFSKKSTGNDNLHTMYLKNLFSEENLKDIVLKLNGEAEIFFRKSSIKNPIIHKKGSILVNRTYEAEEKDQFGNIQIVRKNIPENIYQELYKYFNDKSDKELSDEAAKLKNVVGHHEAATNIVKDYRYTYDKYFLHMPITINFKANKTGFINDRILQYIAKEKDLHVIGIDRGERNLIYVSVIDTCGNIVEQKSFNIVNGYDYQIKLKQQEGARQIARKEWKEIGKIKEIKEGYLSLVIHEISKMVIKYNAIIAMEDLSYGFKKGRFKVERQVYQKFETMLINKLNYLVFKDISITENGGLLKGYQLTYIPDVLKNVGHQCGCIFYVPAAYTSKIDPTTGFVNIFKFKDLTVDAKREFIKKFDSIRYDSEKNLFCFTFDYNNFITQNTVMSKSSWSVYTYGVRIKRRFVNGRFSNESDTIDITKDMEKTLEMTDINWRDGHDLRQDIIDYEIVQHIFEIFRLTVQMRNSLSELEDRDYDRLISPVLNENNIFYDSAKAGDALPKDADANGAYCIALKGLYEIKQITENWKEDGKFSRDKLKISNKDWFDFIQNKRYL

SEQ ID NO: 179 - DNA, 3789 bp, synthetic construct
  source 1..3789: mol_type = other DNA
atgaataacggtaccaataactttcaaaattttatcgggatctcctcgttgcaaaaaactcttcgtaatgctttaatcccgactgagacaacacagcagttcctggttaaaaacggcatcattaaagaagatgagctgcgcggcgagaaccgtcagattttaaaggacatcatggacgactattaccgtgggttcatctcagaaacattaagcagcatcgatgatatcgactggacctcactgtttgagaagatggagattcaacttaagaatggagacaacaaagacactttaattaaggagcagacggaatatcgtaaagctatccataaaaaatttgcaaacgatgaccgtttcaaaaatatgttttccgcaaaattgattagcgacattttacctgaattcgtaatccataacaacaactattccgcatctgaaaaagaggagaagacccaagttatcaaacttttttcacgtttcgcgacatcttttaaagactactttaagaatcgtgcgaattgtttcagtgcagatgatatttcgtctagttcatgtcaccgtatcgtgaatgacaacgctgagattttcttttctaatgcgttggtgtatcgccgcatcgtaaagtccttgtcgaatgatgatatcaacaaaattagtggtgacatgaaagactccctgaaagaaatgtcattagaggagatttacagctacgaaaaatacggagagttcatcactcaggaaggtatctccttttacaacgatatttgcggcaaagttaatagtttcatgaatctgtattgtcagaagaataaggaaaacaagaatctgtacaagttacaaaagcttcataaacagatcttgtgcatcgccgacacgtcttatgaagtcccgtataaatttgaaagcgacgaagaagtatatcagagtgtgaatggattcttggacaatatctcatcaaaacacattgttgaacgtttgcgcaaaatcggcgacaactataacggatacaacttggataaaatttatatcgtatcaaaattttatgaatcagtatcccaaaagacttaccgtgattgggagactattaatacggcgttagaaatccattacaacaacattctgccgggtaacggtaaatcgaaagcggacaaagtgaagaaggcggttaagaacgatcttcagaagtctatcacggagattaatgagctggtttccaattacaagttgtgctcggatgataacatcaaagctgaaacctatatccatgaaatttctcatattcttaataacttcgaggcacaagaattaaaatataacccagaaattcatctggttgagagcgaacttaaagcttcagaattaaaaaatgttttggacgtaattatgaacgccttccattggtgcaaagtgtttatgacagaggagttagtagataaggataacaacttttatgcagaattggaagagatctatgatgagatctatccagtgatttcactgtataacttagtccgtaattacgtcactcagaagccgtactcaactaaaaagatcaagttaaattttggaattccgacattggcggatggttggagtaagtctaaggaatactcaaataacgctattatcttaatgcgtgacaacctgtattacttgggtattttcaatgccaaaaataagcccgataaaaaaatcattgaagggaatacttcagaaaataagggagattacaaaaaaatgatttataaccttttgccaggcccaaacaaaatgatccccaaggtgtttttgagtagtaagacgggagtagaaacatataagccatcagcgtacattcttgaagggtacaaacaaaataaacacatcaagagcagcaaggactttgacattacattttgtcatgacttaatcgactactttaaaaattgcattgccattcaccctgagtggaaaaattttggtttcgacttcagtgatacctctacctatgaagatatctctggtttttatcgtgaggtagaacttcagggttacaagatcgattggacgtacatttccgagaaagacattgatcttttacaagagaagggtcagctttacttatttcagatctacaataaagacttttcgaaaaaatccacgggcaacgacaaccttcatacaatgtacttaaagaacctgttctctgaagaaaacttgaaagatatcgtgcttaaattgaatggcgaggccgagatttttttccgtaaaagctcgattaagaatcccatcatccacaagaaaggcagcattctggtaaatcgtacctatgaagcggaggaaaaggaccaatttggtaatattcagattgtccgtaagaacatccctgaaaatatctatcaagaattatataaatatttcaacgataagtcggacaaggaacttagcgatgaagccgcgaagttgaaaaatgttgttggtcaccacgaagcagcaacaaacattgtgaaagactatcgctacacttacgataagtactttttacatatgcctattacgattaactttaaggcaaataagacaggttttatcaacgaccgtatcctgcaatatattgcaaaagagaaggacctgcatgtcattgggattgatcgcggtgaacgcaatctgatttacgtgagtgttattgatacctgcggtaatattgttgagcaaaagtcttttaatatcgttaatggttacgactaccaaattaagcttaaacaacaggaaggtgcccgccagatcgcccgtaaggagtggaaggaaatcggaaaaattaaggaaatcaaagagggatatctgagcttggttattcatgaaatctcaaagatggttattaagtacaacgccatcatcgctatggaagacttatcgtatgggtttaaaaagggtcgtttcaaagttgagcgccaggtctaccaaaagtttgaaacgatgcttattaataaattaaactacttggttttcaaagatatctctattaccgagaatggaggtttactgaaaggataccagttaacgtatatccccgataagcttaaaaacgtgggccatcagtgtggctgtattttctatgtgcccgcggcatatacatcaaaaattgacccgacgacgggtttcgttaatatcttcaagttcaaagatctgacagttgatgcaaaacgcgaattcattaagaagttcgatagtattcgctatgactccgagaaaaatttgttttgcttcacttttgactacaataactttattactcagaatacagtcatgagtaaaagctcctggtcggtttacacgtacggggtacgcatcaaacgtcgttttgtgaatggtcgttttagtaatgagtcggatacaattgatattaccaaggatatggagaagactctggaaatgacagacatcaattggcgtgatggacatgatttgcgtcaggacattatcgactatgagattgtgcagcatattttcgaaatttttcgcctgacggtgcaaatgcgtaattccttaagcgaactggaagatcgcgactatgaccgcttaatttctcctgtgctgaatgagaacaacatcttctatgactcagcgaaagccggggacgctttgccaaaggatgcagatgctaacggtgcatattgtattgctctgaaaggcctttacgagatcaaacaaattactgaaaactggaaggaagatggaaagttttcccgtgataaattgaagatctctaataaggactggtttgactttatccaaaataaacgttattta

SEQ ID NO: 180 - protein, 1263 aa, synthetic construct; identical to SEQ ID NO: 54

SEQ ID NO: 181 - DNA, 3789 bp, synthetic construct
  source 1..3789: mol_type = other DNA
atgaataacggtaccaataactttcaaaattttatcgggatctcctcgttgcaaaaaactcttcgtaatgctttaatcccgactgagacaacacagcagttcctggttaaaaacggcatcattaaagaagatgagctgcgcggcgagaaccgtcagattttaaaggacatcatggacgactattaccgtgggttcatctcagaaacattaagcagcatcgatgatatcgactggacctcactgtttgagaagatggagattcaacttaagaatggagacaacaaagacactttaattaaggagcagacggaatatcgtaaagctatccataaaaaatttgcaaacgatgaccgtttcaaaaatatgttttccgcaaaattgattagcgacattttacctgaattcgtaatccataacaacaactattccgcatctgaaaaagaggagaagacccaagttatcaaacttttttcacgtttcgcgacatcttttaaagactactttaagaatcgtgcgaattgtttcagtgcagatgatatttcgtctagttcatgtcaccgtatcgtgaatgacaacgctgagattttcttttctaatgcgttggtgtatcgccgcatcgtaaagtccttgtcgaatgatgatatcaacaaaattagtggtgacatgaaagactccctgaaagaaatgtcattagaggagatttacagctacgaaaaatacggagagttcatcactcaggaaggtatctccttttacaacgatatttgcggcaaagttaatagtttcatgaatctgtattgtcagaagaataaggaaaacaagaatctgtacaagttacaaaagcttcataaacagatcttgtgcatcgccgacacgtcttatgaagtcccgtataaatttgaaagcgacgaagaagtatatcagagtgtgaatggattcttggacaatatctcatcaaaacacattgttgaacgtttgcgcaaaatcggcgacaactataacggatacaacttggataaaatttatatcgtatcaaaattttatgaatcagtatcccaaaagacttaccgtgattgggagactattaatacggcgttagaaatccattacaacaacattctgccgggtaacggtaaatcgaaagcggacaaagtgaagaaggcggttaagaacgatcttcagaagtctatcacggagattaatgagctggtttccaattacaagttgtgctcggatgataacatcaaagctgaaacctatatccatgaaatttctcatattcttaataacttcgaggcacaagaattaaaatataacccagaaattcatctggttgagagcgaacttaaagcttcagaattaaaaaatgttttggacgtaattatgaacgccttccattggtgcagcgtgtttatgacagaggagttagtagataaggataacaacttttatgcagaattggaagagatctatgatgagatctatccagtgatttcactgtataacttagtccgtaattacgtcactcagaagccgtactcaactaaaaagatcaagttaaattttggaattccgacattggcggatggttggagtaagtctaaggaatactcaaataacgctattatcttaatgcgtgacaacctgtattacttgggtattttcaatgccaaaaataagcccgataaaaaaatcattgaagggaatacttcagaaaataagggagattacaaaaaaatgatttataaccttttgccaggcccaaacaaaatgatccccaaggtgtttttgagtagtaagacgggagtagaaacatataagccatcagcgtacattcttgaagggtacaaacaaaataaacacatcaagagcagcaaggactttgacattacattttgtcatgacttaatcgactactttaaaaattgcattgccattcaccctgagtggaaaaattttggtttcgacttcagtgatacctctacctatgaagatatctctggtttttatcgtgaggtagaacttcagggttacaagatcgattggacgtacatttccgagaaagacattgatcttttacaagagaagggtcagctttacttatttcagatctacaataaagacttttcgaaaaaatccacgggcaacgacaaccttcatacaatgtacttaaagaacctgttctctgaagaaaacttgaaagatatcgtgcttaaattgaatggcgaggccgagatttttttccgtaaaagctcgattaagaatcccatcatccacaagaaaggcagcattctggtaaatcgtacctatgaagcggaggaaaaggaccaatttggtaatattcagattgtccgtaagaacatccctgaaaatatctatcaagaattatataaatatttcaacgataagtcggacaaggaacttagcgatgaagccgcgaagttgaaaaatgttgttggtcaccacgaagcagcatttaacattgtgaaagactatcgctacacttacgataagtactttttacatatgcctattacgattaactttaaggcaaataagacaggttttatcaacgaccgtatcctgcaatatattgcaaaagagaaggacctgcatgtcattgggattgatcgcggtgaacgcaatctgatttacgtgagtgttattgatacctgcggtaatattgttgagcaaaagtcttttaatatcgttaatggttacgactaccaaattaagcttaaacaacaggaaggtgcccgccagatcgcccgtaaggagtggaaggaaatcggaaaaattaaggaaatcaaagagggatatctgagcttggttattcatgaaatctcaaagatggttattaagtacaacgccatcatcgctatggaagacttatcgtatgggtttaaaaagggtcgtttcaaagttgagcgccaggtctaccaaaagtttgaaacgatgcttattaataaattaaactacttggttttcaaagatatctctattaccgagaatggaggtttactgaaaggataccagttaacgtatatccccgataagcttaaaaacgtgggccatcagtgtggctgtattttctatgtgcccgcggcatatacatcaaaaattgacccgacgacgggtttcgttaatatcttcaagttcaaagatctgacagttgatgcaaaacgcgaattcattaagaagttcgatagtattcgctatgactccgagaaaaatttgttttgcttcacttttgactacaataactttattactcagaatacagtcatgagtaaaagctcctggtcggtttacacgtacggggtacgcatcaaacgtcgttttgtgaatggtcgttttagtaatgagtcggatacaattgatattaccaaggatatggagaagactctggaaatgacagacatcaattggcgtgatggacatgatttgcgtcaggacattatcgactatgagattgtgcagcatattttcgaaatttttcgcctgacggtgcaaatgcgtaattccttaagcgaactggaagatcgcgactatgaccgcttaatttctcctgtgctgaatgagaacaacatcttctatgactcagcgaaagccggggacgctttgccaaaggatgcagatgctaacggtgcatattgtattgctctgaaaggcctttacgagatcaaacaaattactgaaaactggaaggaagatggaaagttttcccgtgataaattgaagatctctaataaggactggtttgactttatccaaaataaacgttattta

SEQ ID NO: 182 - protein, 1263 aa, synthetic construct; identical to SEQ ID NO: 154

SEQ ID NO: 183 - DNA, 3789 bp, synthetic construct
  source 1..3789: mol_type = other DNA
atgaataacggtaccaataactttcaaaattttatcgggatctcctcgttgcaaaaaactcttcgtaatgctttaatcccgactgagacaacacagcagttcatcgttaaaaacggccagattaaagaagatgagctgcgcggcgagaaccgtcagattttaaaggacatcatggacgactattaccgtgggttcatctcagaaacattaagcagcatcgatgatatcgactggacctcactgtttgagaagatggagattcaacttaagaatggagacaacaaagacactttaattaaggagcagacggaatatcgtaaagctatccataaaaaatttgcaaacgatgaccgtttcaaaaatatgttttccgcaaaattgattagcgacattttacctgaattcgtaatccataacaacaactattccgcatctgaaaaagaggagaagacccaagttatcaaacttttttcacgtttcgcgacatcttttaaagactactttaagaatcgtgcgaattgtttcagtgcagatgatatttcgtctagttcatgtcaccgtatcgtgaatgacaacgctgagattttcttttctaatgcgttggtgtatcgccgcatcgtaaagtccttgtcgaatgatgatatcaacaaaattagtggtgacatgaaagactccctgaaagaaatgtcattagaggagatttacagctacgaaaaatacggagagttcatcactcaggaaggtatctccttttacaacgatatttgcggcaaagttaatagtttcatgaatctgtattgtcagaagaataaggaaaacaagaatctgtacaagttacaaaagcttcataaacagatcttgtgcatcgccgacacgtcttatgaagtcccgtataaatttgaaagcgacgaagaagtatatcagagtgtgaatggattcttggacaatatctcatcaaaacacattgttgaacgtttgcgcaaaatcggcgacaactataacggatacaacttggataaaatttatatcgtatcaaaattttatgaatcagtatcccaaaagacttaccgtgattgggagactattaatacggcgttagaaatccattacaacaacattctgccgggtaacggtaaatcgaaagcggacaaagtgaagaaggcggttaagaacgatcttcagaagtctatcacggagattaatgagctggtttccaattacaagttgtgctcggatgataacatcaaagctgaaacctatatccatgaaatttctcatattcttaataacttcgaggcacaagaattaaaatataacccagaaattcatctggttgagagcgaacttaaagcttcagaattaaaaaatgttttggacgtaattatgaacgccttccattggtgcaaagtgtttatgacagaggagttagtagataaggataacaacttttatgcagaattggaagagatctatgatgagatctatccagtgatttcactgtataacttagtccgtaattacgtcactcagaagccgtactcaactaaaaagatcaagttaaattttggaattccgacattggcggatggttggagtaagtctaaggaatactcaaataacgctattatcttaatgcgtgacaacctgtattacttgggtattttcaatgccaaaaataagcccgataaaaaaatcattgaagggaatacttcagaaaataagggagattacaaaaaaatgatttataaccttttgccaggcccaaacaaaatgatccccaaggtgtttttgagtagtaagacgggagtagaaacatataagccatcagcgtacattcttgaagggtacaaacaaaataaacacatcaagagcagcaaggactttgacattacattttgtcatgacttaatcgactactttaaaaattgcattgccattcaccctgagtggaaaaattttggtttcgacttcagtgatacctctacctatgaagatatctctggtttttatcgtgaggtagaacttcagggttacaagatcgattggacgtacatttccgagaaagacattgatcttttacaagagaagggtcagctttacttatttcagatctacaataaagacttttcgaaaaaatccacgggcaacgacaaccttcatacaatgtacttaaagaacctgttctctgaagaaaacttgaaagatatcgtgcttaaattgaatggcgaggccgagatttttttccgtaaaagctcgattaagaatcccatcatccacaagaaaggcagcattctggtaaatcgtacctatgaagcggaggaaaaggaccaatttggtaatattcagattgtccgtaagaacatccctgaaaatatctatcaagaattatataaatatttcaacgataagtcggacaaggaacttagcgatgaagccgcgaagttgaaaaatgttgttggtcaccacgaagcagcaacaaacattgtgaaagactatcgctacacttacgataagtactttttacatatgcctattacgattaactttaaggcaaataagacaggttttatcaacgaccgtatcctgcaatatattgcaaaagagaaggacctgcatgtcattgggattgatcgcggtgaacgcaatctgatttacgtgagtgttattgatacctgcggtaatattgttgagcaaaagtcttttaatatcgttaatggttacgactaccaaattaagcttaaacaacaggaaggtgcccgccagatcgcccgtaaggagtggaaggaaatcggaaaaattaaggaaatcaaagagggatatctgagcttggttattcatgaaatctcaaagatggttattaagtacaacgccatcatcgctatggaagacttatcgtatgggtttaaaaagggtcgtttcaaagttgagcgccaggtctaccaaaagtttgaaacgatgcttattaataaattaaactacttggttttcaaagatatctctattaccgagaatggaggtttactgaaaggataccagttaacgtatatccccgataagcttaaaaacgtgggccatcagtgtggctgtattttctatgtgcccgcggcatatacatcaaaaattgacccgacgacgggtttcgttaatatcttcaagttcaaagatctgacagttgatgcaaaacgcgaattcattaagaagttcgatagtattcgctatgactccgagaaaaatttgttttgcttcacttttgactacaataactttattactcagaatacagtcatgagtaaaagctcctggtcggtttacacgtacggggtacgcatcaaacgtcgttttgtgaatggtcgttttagtaatgagtcggatacaattgatattaccaaggatatggagaagactctggaaatgacagacatcaattggcgtgatggacatgatttgcgtcaggacattatcgactatgagattgtgcagcatattttcgaaatttttcgcctgacggtgcaaatgcgtaattccttaagcgaactggaagatcgcgactatgaccgcttaatttctcctgtgctgaatgagaacaacatcttctatgactcagcgaaagccggggacgctttgccaaaggatgcagatgctaacggtgcatattgtattgctctgaaaggcctttacgagatcaaacaaattactgaaaactggaaggaagatggaaagttttcccgtgataaattgaagatctctaataaggactggtttgactttatccaaaataaacgttattta

SEQ ID NO: 184 - protein, 1263 aa, synthetic construct
MNNGTNNFQNFIGISSLQKTLRNALIPTETTQQFIVKNGQIKEDELRGENRQILKDIMDDYYRGFISETLSSIDDIDWTSLFEKMEIQLKNGDNKDTLIKEQTEYRKAIHKKFANDDRFKNMFSAKLISDILPEFVIHNNNYSASEKEEKTQVIKLFSRFATSFKDYFKNRANCFSADDISSSSCHRIVNDNAEIFFSNALVYRRIVKSLSNDDINKISGDMKDSLKEMSLEEIYSYEKYGEFITQEGISFYNDICGKVNSFMNLYCQKNKENKNLYKLQKLHKQILCIADTSYEVPYKFESDEEVYQSVNGFLDNISSKHIVERLRKIGDNYNGYNLDKIYIVSKFYESVSQKTYRDWETINTALEIHYNNILPGNGKSKADKVKKAVKNDLQKSITEINELVSNYKLCSDDNIKAETYIHEISHILNNFEAQELKYNPEIHLVESELKASELKNVLDVIMNAFHWCKVFMTEELVDKDNNFYAELEEIYDEIYPVISLYNLVRNYVTQKPYSTKKIKLNFGIPTLADGWSKSKEYSNNAIILMRDNLYYLGIFNAKNKPDKKIIEGNTSENKGDYKKMIYNLLPGPNKMIPKVFLSSKTGVETYKPSAYILEGYKQNKHIKSSKDFDITFCHDLIDYFKNCIAIHPEWKNFGFDFSDTSTYEDISGFYREVELQGYKIDWTYISEKDIDLLQEKGQLYLFQIYNKDFSKKSTGNDNLHTMYLKNLFSEENLKDIVLKLNGEAEIFFRKSSIKNPIIHKKGSILVNRTYEAEEKDQFGNIQIVRKNIPENIYQELYKYFNDKSDKELSDEAAKLKNVVGHHEAATNIVKDYRYTYDKYFLHMPITINFKANKTGFINDRILQYIAKEKDLHVIGIDRGERNLIYVSVIDTCGNIVEQKSFNIVNGYDYQIKLKQQEGARQIARKEWKEIGKIKEIKEGYLSLVIHEISKMVIKYNAIIAMEDLSYGFKKGRFKVERQVYQKFETMLINKLNYLVFKDISITENGGLLKGYQLTYIPDKLKNVGHQCGCIFYVPAAYTSKIDPTTGFVNIFKFKDLTVDAKREFIKKFDSIRYDSEKNLFCFTFDYNNFITQNTVMSKSSWSVYTYGVRIKRRFVNGRFSNESDTIDITKDMEKTLEMTDINWRDGHDLRQDIIDYEIVQHIFEIFRLTVQMRNSLSELEDRDYDRLISPVLNENNIFYDSAKAGDALPKDADANGAYCIALKGLYEIKQITENWKEDGKFSRDKLKISNKDWFDFIQNKRYL

SEQ ID NO: 185 - DNA, 3789 bp, synthetic construct
  source 1..3789: mol_type = other DNA
atgaataacggtaccaataactttcaaaattttatcgggatctcctcgttgcaaaaaactcttcgtaatgctttaatcccgactgagacaacacagcagttcatcgttaaaaacggccagattaaagaagatgagctgcgcggcgagaaccgtcagattttaaaggacatcatggacgactattaccgtgggttcatctcagaaacattaagcagcatcgatgatatcgactggacctcactgtttgagaagatggagattcaacttaagaatggagacaacaaagacactttaattaaggagcagacggaatatcgtaaagctatccataaaaaatttgcaaacgatgaccgtttcaaaaatatgttttccgcaaaattgattagcgacattttacctgaattcgtaatccataacaacaactattccgcatctgaaaaagaggagaagacccaagttatcaaacttttttcacgtttcgcgacatcttttaaagactactttaagaatcgtgcgaattgtttcagtgcagatgatatttcgtctagttcatgtcaccgtatcgtgaatgacaacgctgagattttcttttctaatgcgttggtgtatcgccgcatcgtaaagtccttgtcgaatgatgatatcaacaaaattagtggtgacatgaaagactccctgaaagaaatgtcattagaggagatttacagctacgaaaaatacggagagttcatcactcaggaaggtatctccttttacaacgatatttgcggcaaagttaatagtttcatgaatctgtattgtcagaagaataaggaaaacaagaatctgtacaagttacaaaagcttcataaacagatcttgtgcatcgccgacacgtcttatgaagtcccgtataaatttgaaagcgacgaagaagtatatcagagtgtgaatggattcttggacaatatctcatcaaaacacattgttgaacgtttgcgcaaaatcggcgacaactataacggatacaacttggataaaatttatatcgtatcaaaattttatgaatcagtatcccaaaagacttaccgtgattgggagactattaatacggcgttagaaatccattacaacaacattctgccgggtaacggtaaatcgaaagcggacaaagtgaagaaggcggttaagaacgatcttcagaagtctatcacggagattaatgagctggtttccaattacaagttgtgctcggatgataacatcaaagctgaaacctatatccatgaaatttctcatattcttaataacttcgaggcacaagaattaaaatataacccagaaattcatctggttgagagcgaacttaaagcttcagaattaaaaaatgttttggacgtaattatgaacgccttccattggtgcagcgtgtttatgacagaggagttagtagataaggataacaacttttatgcagaattggaagagatctatgatgagatctatccagtgatttcactgtataacttagtccgtaattacgtcactcagaagccgtactcaactaaaaagatcaagttaaattttggaattccgacattggcggatggttggagtaagtctaaggaatactcaaataacgctattatcttaatgcgtgacaacctgtattacttgggtattttcaatgccaaaaataagcccgataaaaaaatcattgaagggaatacttcagaaaataagggagattacaaaaaaatgatttataaccttttgccaggcccaaacaaaatgatccccaaggtgtttttgagtagtaagacgggagtagaaacatataagccatcagcgtacattcttgaagggtacaaacaaaataaacacatcaagagcagcaaggactttgacattacattttgtcatgacttaatcgactactttaaaaattgcattgccattcaccctgagtggaaaaattttggtttcgacttcagtgatacctctacctatgaagatatctctggtttttatcgtgaggtagaacttcagggttacaagatcgattggacgtacatttccgagaaagacattgatcttttacaagagaagggtcagctttacttatttcagatctacaataaagacttttcgaaaaaatccacgggcaacgacaaccttcatacaatgtacttaaagaacctgttctctgaagaaaacttgaaagatatcgtgcttaaattgaatggcgaggccgagatttttttccgtaaaagctcgattaagaatcccatcatccacaagaaaggcagcattctggtaaatcgtacctatgaagcggaggaaaaggaccaatttggtaatattcagattgtccgtaagaacatccctgaaaatatctatcaagaattatataaatatttcaacgataagtcggacaaggaacttagcgatgaagccgcgaagttgaaaaatgttgttggtcaccacgaagcagcatttaacattgtgaaagactatcgctacacttacgataagtactttttacatatgcctattacgattaactttaaggcaaataagacaggttttatcaacgaccgtatcctgcaatatattgcaaaagagaaggacctgcatgtcattgggattgatcgcggtgaacgcaatctgatttacgtgagtgttattgatacctgcggtaatattgttgagcaaaagtcttttaatatcgttaatggttacgactaccaaattaagcttaaacaacaggaaggtgcccgccagatcgcccgtaaggagtggaaggaaatcggaaaaattaaggaaatcaaagagggatatctgagcttggttattcatgaaatctcaaagatggttattaagtacaacgccatcatcgctatggaagacttatcgtatgggtttaaaaagggtcgtttcaaagttgagcgccaggtctaccaaaagtttgaaacgatgcttattaataaattaaactacttggttttcaaagatatctctattaccgagaatggaggtttactgaaaggataccagttaacgtatatccccgataagcttaaaaacgtgggccatcagtgtggctgtattttctatgtgcccgcggcatatacatcaaaaattgacccgacgacgggtttcgttaatatcttcaagttcaaagatctgacagttgatgcaaaacgcgaattcattaagaagttcgatagtattcgctatgactccgagaaaaatttgttttgcttcacttttgactacaataactttattactcagaatacagtcatgagtaaaagctcctggtcggtttacacgtacggggtacgcatcaaacgtcgttttgtgaatggtcgttttagtaatgagtcggatacaattgatattaccaaggatatggagaagactctggaaatgacagacatcaattggcgtgatggacatgatttgcgtcaggacattatcgactatgagattgtgcagcatattttcgaaatttttcgcctgacggtgcaaatgcgtaattccttaagcgaactggaagatcgcgactatgaccgcttaatttctcctgtgctgaatgagaacaacatcttctatgactcagcgaaagccggggacgctttgccaaaggatgcagatgctaacggtgcatattgtattgctctgaaaggcctttacgagatcaaacaaattactgaaaactggaaggaagatggaaagttttcccgtgataaattgaagatctctaataaggactggtttgactttatccaaaataaacgttattta

SEQ ID NO: 186 - protein, 1263 aa, synthetic construct
MNNGTNNFQNFIGISSLQKTLRNALIPTETTQQFIVKNGQIKEDELRGENRQILKDIMDDYYRGFISETLSSIDDIDWTSLFEKMEIQLKNGDNKDTLIKEQTEYRKAIHKKFANDDRFKNMFSAKLISDILPEFVIHNNNYSASEKEEKTQVIKLFSRFATSFKDYFKNRANCFSADDISSSSCHRIVNDNAEIFFSNALVYRRIVKSLSNDDINKISGDMKDSLKEMSLEEIYSYEKYGEFITQEGISFYNDICGKVNSFMNLYCQKNKENKNLYKLQKLHKQILCIADTSYEVPYKFESDEEVYQSVNGFLDNISSKHIVERLRKIGDNYNGYNLDKIYIVSKFYESVSQKTYRDWETINTALEIHYNNILPGNGKSKADKVKKAVKNDLQKSITEINELVSNYKLCSDDNIKAETYIHEISHILNNFEAQELKYNPEIHLVESELKASELKNVLDVIMNAFHWCSVFMTEELVDKDNNFYAELEEIYDEIYPVISLYNLVRNYVTQKPYSTKKIKLNFGIPTLADGWSKSKEYSNNAIILMRDNLYYLGIFNAKNKPDKKIIEGNTSENKGDYKKMIYNLLPGPNKMIPKVFLSSKTGVETYKPSAYILEGYKQNKHIKSSKDFDITFCHDLIDYFKNCIAIHPEWKNFGFDFSDTSTYEDISGFYREVELQGYKIDWTYISEKDIDLLQEKGQLYLFQIYNKDFSKKSTGNDNLHTMYLKNLFSEENLKDIVLKLNGEAEIFFRKSSIKNPIIHKKGSILVNRTYEAEEKDQFGNIQIVRKNIPENIYQELYKYFNDKSDKELSDEAAKLKNVVGHHEAAFNIVKDYRYTYDKYFLHMPITINFKANKTGFINDRILQYIAKEKDLHVIGIDRGERNLIYVSVIDTCGNIVEQKSFNIVNGYDYQIKLKQQEGARQIARKEWKEIGKIKEIKEGYLSLVIHEISKMVIKYNAIIAMEDLSYGFKKGRFKVERQVYQKFETMLINKLNYLVFKDISITENGGLLKGYQLTYIPDKLKNVGHQCGCIFYVPAAYTSKIDPTTGFVNIFKFKDLTVDAKREFIKKFDSIRYDSEKNLFCFTFDYNNFITQNTVMSKSSWSVYTYGVRIKRRFVNGRFSNESDTIDITKDMEKTLEMTDINWRDGHDLRQDIIDYEIVQHIFEIFRLTVQMRNSLSELEDRDYDRLISPVLNENNIFYDSAKAGDALPKDADANGAYCIALKGLYEIKQITENWKEDGKFSRDKLKISNKDWFDFIQNKRYL

SEQ ID NO: 187 - DNA, 3789 bp, synthetic construct
  source 1..3789: mol_type = other DNA
atgaataacggtaccaataactttcaaaattttatcgggatctcctcgttgcaaaaaactcttcgtaatgctttaatcccgactgagacaacacagcagttcatcgttaaaaacggcatcattaaagaagatgagctgcgcggcgagaaccgtcagattttaaaggacatcatggacgactattaccgtgggttcatctcagaaacattaagcagcatcgatgatatcgactggacctcactgtttgagaagatggagattcaacttaagaatggagacaacaaagacactttaattaaggagcagacggaatatcgtaaagctatccataaaaaatttgcaaacgatgaccgtttcaaaaatatgttttccgcaaaattgattagcgacattttacctgaattcgtaatccataacaacaactattccgcatctgaaaaagaggagaagacccaagttatcaaacttttttcacgtttcgcgacatcttttaaagactactttaagaatcgtgcgaattgtttcagtgcagatgatatttcgtctagttcatgtcaccgtatcgtgaatgacaacgctgagattttcttttctaatgcgttggtgtatcgccgcatcgtaaagtccttgtcgaatgatgatatcaacaaaattagtggtgacatgaaagactccctgaaagaaatgtcattagaggagatttacagctacgaaaaatacggagagttcatcactcaggaaggtatctccttttacaacgatatttgcggcaaagttaatagtttcatgaatctgtattgtcagaagaataaggaaaacaagaatctgtacaagttacaaaagcttcataaacagatcttgtgcatcgccgacacgtcttatgaagtcccgtataaatttgaaagcgacgaagaagtatatcagagtgtgaatggattcttggacaatatctcatcaaaacacattgttgaacgtttgcgcaaaatcggcgacaactataacggatacaacttggataaaatttatatcgtatcaaaattttatgaatcagtatcccaaaagacttaccgtgattgggagactattaatacggcgttagaaatccattacaacaacattctgccgggtaacggtaaatcgaaagcggacaaagtgaagaaggcggttaagaacgatcttcagaagtctatcacggagattaatgagctggtttccaattacaagttgtgctcggatgataacatcaaagctgaaacctatatccatgaaatttctcatattcttaataacttcgaggcacaagaattaaaatataacccagaaattcatctggttgagagcgaacttaaagcttcagaattaaaaaatgttttggacgtaattatgaacgccttccattggtgcaaagtgtttatgacagaggagttagtagataaggataacaacttttatgcagaattggaagagatctatgatgagatctatccagtgatttcactgtataacttagtccgtaattacgtcactcagaagccgtactcaactccgaagatcaagttaaattttggaattccgacattggcggatggttggagtaagtctaaggaatactcaaataacgctattatcttaatgcgtgacaacctgtattacttgggtattttcaatgccaaaaataagcccgataaaaaaatcattgaagggaatacttcagaaaataagggagattacaaaaaaatgatttataaccttttgccaggcccaaacaaaatgatccccaaggtgtttttgagtagtaagacgggagtagaaacatataagccatcagcgtacattcttgaagggtacaaacaaaataaacacatcaagagcagcaaggactttgacattacattttgtcatgacttaatcgactactttaaaaattgcattgccattcaccctgagtggaaaaattttggtttcgacttcagtgatacctctacctatgaagatatctctggtttttatcgtgaggtagaacttcagggttacaagatcgattggacgtacatttccgagaaagacattgatcttttacaagagaagggtcagctttacttatttcagatctacaataaagacttttcgaaaaaatccacgggcaacgacaaccttcatacaatgtacttaaagaacctgttctctgaagaaaacttgaaagatatcgtgcttaaattgaatggcgaggccgagatttttttccgtaaaagctcgattaagaatcccatcatccacaagaaaggcagcattctggtaaatcgtacctatgaagcggaggaaaaggaccaatttggtaatattcagattgtccgtaagaacatccctgaaaatatctatcaagaattatataaatatttcaacgataagtcggacaaggaacttagcgatgaagccgcgaagttgaaaaatgttgttggtcaccacgaagcagcaacaaacattgtgaaagactatcgctacacttacgataagtactttttacatatgcctattacgattaactttaaggcaaataagacaggttttatcaacgaccgtatcctgcaatatattgcaaaagagaaggacctgcatgtcattgggattgatcgcggtgaacgcaatctgatttacgtgagtgttattgatacctgcggtaatattgttgagcaaaagtcttttaatatcgttaatggttacgactaccaaattaagcttaaacaacaggaaggtgcccgccagatcgcccgtaaggagtggaaggaaatcggaaaaattaaggaaatcaaagagggatatctgagcttggttattcatgaaatctcaaagatggttattaagtacaacgccatcatcgctatggaagacttatcgtatgggtttaaaaagggtcgtttcaaagttgagcgccaggtctaccaaaagtttgaaacgatgcttattaataaattaaactacttggttttcaaagatatctctattaccgagaatggaggtttactgaaaggataccagttaacgtatatccccgataagcttaaaaacgtgggccatcagtgtggctgtattttctatgtgcccgcggcatatacatcaaaaattgacccgacgacgggtttcgttaatatcttcaagttcaaagatctgacagttgatgcaaaacgcgaattcattaagaagttcgatagtattcgctatgactccgagaaaaatttgttttgcttcacttttgactacaataactttattactcagaatacagtcatgagtaaaagctcctggtcggtttacacgtacggggtacgcatcaaacgtcgttttgtgaatggtcgttttagtaatgagtcggatacaattgatattaccaaggatatggagaagactctggaaatgacagacatcaattggcgtgatggacatgatttgcgtcaggacattatcgactatgagattgtgcagcatattttcgaaatttttcgcctgacggtgcaaatgcgtaattccttaagcgaactggaagatcgcgactatgaccgcttaatttctcctgtgctgaatgagaacaacatcttctatgactcagcgaaagccggggacgctttgccaaaggatgcagatgctaacggtgcatattgtattgctctgaaaggcctttacgagatcaaacaaattactgaaaactggaaggaagatggaaagttttcccgtgataaattgaagatctctaataaggactggtttgactttatccaaaataaacgttattta

SEQ ID NO: 188 - protein, 1263 aa, synthetic construct
MNNGTNNFQNFIGISSLQKTLRNALIPTETTQQFIVKNGIIKEDELRGENRQILKDIMDDYYRGFISETLSSIDDIDWTSLFEKMEIQLKNGDNKDTLIKEQTEYRKAIHKKFANDDRFKNMFSAKLISDILPEFVIHNNNYSASEKEEKTQVIKLFSRFATSFKDYFKNRANCFSADDISSSSCHRIVNDNAEIFFSNALVYRRIVKSLSNDDINKISGDMKDSLKEMSLEEIYSYEKYGEFITQEGISFYNDICGKVNSFMNLYCQKNKENKNLYKLQKLHKQILCIADTSYEVPYKFESDEEVYQSVNGFLDNISSKHIVERLRKIGDNYNGYNLDKIYIVSKFYESVSQKTYRDWETINTALEIHYNNILPGNGKSKADKVKKAVKNDLQKSITEINELVSNYKLCSDDNIKAETYIHEISHILNNFEAQELKYNPEIHLVESELKASELKNVLDVIMNAFHWCKVFMTEELVDKDNNFYAELEEIYDEIYPVISLYNLVRNYVTQKPYSTPKIKLNFGIPTLADGWSKSKEYSNNAIILMRDNLYYLGIFNAKNKPDKKIIEGNTSENKGDYKKMIYNLLPGPNKMIPKVFLSSKTGVETYKPSAYILEGYKQNKHIKSSKDFDITFCHDLIDYFKNCIAIHPEWKNFGFDFSDTSTYEDISGFYREVELQGYKIDWTYISEKDIDLLQEKGQLYLFQIYNKDFSKKSTGNDNLHTMYLKNLFSEENLKDIVLKLNGEAEIFFRKSSIKNPIIHKKGSILVNRTYEAEEKDQFGNIQIVRKNIPENIYQELYKYFNDKSDKELSDEAAKLKNVVGHHEAATNIVKDYRYTYDKYFLHMPITINFKANKTGFINDRILQYIAKEKDLHVIGIDRGERNLIYVSVIDTCGNIVEQKSFNIVNGYDYQIKLKQQEGARQIARKEWKEIGKIKEIKEGYLSLVIHEISKMVIKYNAIIAMEDLSYGFKKGRFKVERQVYQKFETMLINKLNYLVFKDISITENGGLLKGYQLTYIPDKLKNVGHQCGCIFYVPAAYTSKIDPTTGFVNIFKFKDLTVDAKREFIKKFDSIRYDSEKNLFCFTFDYNNFITQNTVMSKSSWSVYTYGVRIKRRFVNGRFSNESDTIDITKDMEKTLEMTDINWRDGHDLRQDIIDYEIVQHIFEIFRLTVQMRNSLSELEDRDYDRLISPVLNENNIFYDSAKAGDALPKDADANGAYCIALKGLYEIKQITENWKEDGKFSRDKLKISNKDWFDFIQNKRYL

SEQ ID NO: 189 - DNA, 3789 bp, synthetic construct
  source 1..3789: mol_type = other DNA
atgaataacggtaccaataactttcaaaattttatcgggatctcctcgttgcaaaaaactcttcgtaatgctttaatcccgactgagacaacacagcagttcatcgttaaaaacggcatcattaaagaagatgagctgcgcggcgagaaccgtcagattttaaaggacatcatggacgactattaccgtgggttcatctcagaaacattaagcagcatcgatgatatcgactggacctcactgtttgagaagatggagattcaacttaagaatggagacaacaaagacactttaattaaggagcagacggaatatcgtaaagctatccataaaaaatttgcaaacgatgaccgtttcaaaaatatgttttccgcaaaattgattagcgacattttacctgaattcgtaatccataacaacaactattccgcatctgaaaaagaggagaagacccaagttatcaaacttttttcacgtttcgcgacatcttttaaagactactttaagaatcgtgcgaattgtttcagtgcagatgatatttcgtctagttcatgtcaccgtatcgtgaatgacaacgctgagattttcttttctaatgcgttggtgtatcgccgcatcgtaaagtccttgtcgaatgatgatatcaacaaaattagtggtgacatgaaagactccctgaaagaaatgtcattagaggagatttacagctacgaaaaatacggagagttcatcactcaggaaggtatctccttttacaacgatatttgcggcaaagttaatagtttcatgaatctgtattgtcagaagaataaggaaaacaagaatctgtacaagttacaaaagcttcataaacagatcttgtgcatcgccgacacgtcttatgaagtcccgtataaatttgaaagcgacgaagaagtatatcagagtgtgaatggattcttggacaatatctcatcaaaacacattgttgaacgtttgcgcaaaatcggcgacaactataacggatacaacttggataaaatttatatcgtatcaaaattttatgaatcagtatcccaaaagacttaccgtgattgggagactattaatacggcgttagaaatccattacaacaacattctgccgggtaacggtaaatcgaaagcggacaaagtgaagaaggcggttaagaacgatcttcagaagtctatcacggagattaatgagctggtttccaattacaagttgtgctcggatgataacatcaaagctgaaacctatatccatgaaatttctcatattcttaataacttcgaggcacaagaattaaaatataacccagaaattcatctggttgagagcgaacttaaagcttcagaattaaaaaatgttttggacgtaattatgaacgccttccattggtgcaaagtgtttatgacagaggagttagtagataaggataacaacttttatgcagaattggaagagatctatgatgagatctatccagtgatttcactgtataacttagtccgtaattacgtcactcagaagccgtactcaactaaaaagatcaagttaaattttggaattccgacattggcggatggttggagtaagtctaaggaatactcaaataacgctattatcttaatgcgtgacaacctgtattacttgggtattttcaatgccaaaaataagcccgataaaaaaatcattgaagggaatacttcagaaaataagggagattacaaaaaaatgatttataaccttttgccaggcccaaacaaaatgatccccaaggtgtttttgagtagtaagacgggagtagaaacatataagccatcagcgtacattcttgaagggtacaaacaaaataaacacatcaagagcagcaaggactttgacattacattttgtcatgacttaatcgactactttaaaaattgcattgccattcaccctgagtggaaaaattttggtttcgacttcagtgatacctctacctatgaagatatctctggtttttatcgtgaggtagaacttcagggttacaagatcgattggacgtacatttccgagaaagacattgatcttttacaagagaagggtcagctttacttatttcagatctacaataaagacttttcgaaaaaatccacgggcaacgacaaccttcatacaatgtacttaaagaacctgttctctgaagaaaacttgaaagatatcgtgcttaaattgaatggcgaggccgagatttttttccgtaaaagctcgattaagaatcccatcatccacaagaaaggcagcattctggtaaatcgtacctatgaagcggaggaaaaggaccaatttggtaatattcagattgtccgtaagaacatccctgaaaatatctatcaagaattatataaatatttcaacgataagtcggacaaggaacttagcgatgaagccgcgaagttgaaaaatgttgttggtcaccacgaagcagcatttaacattgtgaaagactatcgctacacttacgataagtactttttacatatgcctattacgattaactttaaggcaaataagacaggttttatcaacgaccgtatcctgcaatatattgcaaaagagaaggacctgcatgtcattgggattgatcgcggtgaacgcaatctgatttacgtgagtgttattgatacctgcggtaatattgttgagcaaaagtcttttaatatcgttaatggttacgactaccaaattaagcttaaacaacaggaaggtgcccgccagatcgcccgtaaggagtggaaggaaatcggaaaaattaaggaaatcaaagagggatatctgagcttggttattcatgaaatctcaaagatggttattaagtacaacgccatcatcgctatggaagacttatcgtatgggtttaaaaagggtcgtttcaaagttgagcgccaggtctaccaaaagtttgaaacgatgcttattaataaattaaactacttggttttcaaagatatctctattaccgagaatggaggtttactgaaaggataccagttaacgtatatccccgataagcttaaaaacgtgggccatcagtgtggctgtattttctatgtgcccgcggcatatacatcaaaaattgacccgacgacgggtttcgttaatatcttcaagttcaaagatctgacagttgatgcaaaacgcgaattcattaagaagttcgatagtattcgctatgactccgagaaaaatttgttttgcttcacttttgactacaataactttattactcagaatacagtcatgagtaaaagctcctggtcggtttacacgtacggggtacgcatcaaacgtcgttttgtgaatggtcgttttagtaatgagtcggatacaattgatattaccaaggatatggagaagactctggaaatgacagacatcaattggcgtgatggacatgatttgcgtcaggacattatcgactatgagattgtgcagcatattttcgaaatttttcgcctgacggtgcaaatgcgtaattccttaagcgaactggaagatcgcgactatgaccgcttaatttctcctgtgctgaatgagaacaacatcttctatgactcagcgaaagccggggacgctttgccaaaggatgcagatgctaacggtgcatattgtattgctctgaaaggcctttacgagatcaaacaaattactgaaaactggaaggaagatggaaagttttcccgtgataaattgaagatctctaataaggactggtttgactttatccaaaataaacgttattta

SEQ ID NO: 190 - protein, 1263 aa, synthetic construct
MNNGTNNFQNFIGISSLQKTLRNALIPTETTQQFIVKNGIIKEDELRGENRQILKDIMDDYYRGFISETLSSIDDIDWTSLFEKMEIQLKNGDNKDTLIKEQTEYRKAIHKKFANDDRFKNMFSAKLISDILPEFVIHNNNYSASEKEEKTQVIKLFSRFATSFKDYFKNRANCFSADDISSSSCHRIVNDNAEIFFSNALVYRRIVKSLSNDDINKISGDMKDSLKEMSLEEIYSYEKYGEFITQEGISFYNDICGKVNSFMNLYCQKNKENKNLYKLQKLHKQILCIADTSYEVPYKFESDEEVYQSVNGFLDNISSKHIVERLRKIGDNYNGYNLDKIYIVSKFYESVSQKTYRDWETINTALEIHYNNILPGNGKSKADKVKKAVKNDLQKSITEINELVSNYKLCSDDNIKAETYIHEISHILNNFEAQELKYNPEIHLVESELKASELKNVLDVIMNAFHWCKVFMTEELVDKDNNFYAELEEIYDEIYPVISLYNLVRNYVTQKPYSTKKIKLNFGIPTLADGWSKSKEYSNNAIILMRDNLYYLGIFNAKNKPDKKIIEGNTSENKGDYKKMIYNLLPGPNKMIPKVFLSSKTGVETYKPSAYILEGYKQNKHIKSSKDFDITFCHDLIDYFKNCIAIHPEWKNFGFDFSDTSTYEDISGFYREVELQGYKIDWTYISEKDIDLLQEKGQLYLFQIYNKDFSKKSTGNDNLHTMYLKNLFSEENLKDIVLKLNGEAEIFFRKSSIKNPIIHKKGSILVNRTYEAEEKDQFGNIQIVRKNIPENIYQELYKYFNDKSDKELSDEAAKLKNVVGHHEAAFNIVKDYRYTYDKYFLHMPITINFKANKTGFINDRILQYIAKEKDLHVIGIDRGERNLIYVSVIDTCGNIVEQKSFNIVNGYDYQIKLKQQEGARQIARKEWKEIGKIKEIKEGYLSLVIHEISKMVIKYNAIIAMEDLSYGFKKGRFKVERQVYQKFETMLINKLNYLVFKDISITENGGLLKGYQLTYIPDKLKNVGHQCGCIFYVPAAYTSKIDPTTGFVNIFKFKDLTVDAKREFIKKFDSIRYDSEKNLFCFTFDYNNFITQNTVMSKSSWSVYTYGVRIKRRFVNGRFSNESDTIDITKDMEKTLEMTDINWRDGHDLRQDIIDYEIVQHIFEIFRLTVQMRNSLSELEDRDYDRLISPVLNENNIFYDSAKAGDALPKDADANGAYCIALKGLYEIKQITENWKEDGKFSRDKLKISNKDWFDFIQNKRYL

SEQ ID NO: 191 - DNA, 3789 bp, synthetic construct
  source 1..3789: mol_type = other DNA
atgaataacggtaccaataactttcaaaattttatcgggatctcctcgttgcaaaaaactcttcgtaatgctttaatcccgactgagacaacacagcagttcatcgttaaaaacggcatcattaaagaagatgagctgcgcggcgagaaccgtcagattttaaaggacatcatggacgactattaccgtgggttcatctcagaaacattaagcagcatcgatgatatcgactggacctcactgtttgagaagatggagattcaacttaagaatggagacaacaaagacactttaattaaggagcagacggaatatcgtaaagctatccataaaaaatttgcaaacgatgaccgtttcaaaaatatgttttccgcaaaattgattagcgacattttacctgaattcgtaatccataacaacaactattccgcatctgaaaaagaggagaagacccaagttatcaaacttttttcacgtttcgcgacatcttttaaagactactttaagaatcgtgcgaattgtttcagtgcagatgatatttcgtctagttcatgtcaccgtatcgtgaatgacaacgctgagattttcttttctaatgcgttggtgtatcgccgcatcgtaaagtccttgtcgaatgatgatatcaacaaaattagtggtgacatgaaagactccctgaaagaaatgtcattagaggagatttacagctacgaaaaatacggagagttcatcactcaggaaggtatctccttttacaacgatatttgcggcaaagttaatagtttcatgaatctgtattgtcagaagaataaggaaaacaagaatctgtacaagttacaaaagcttcataaacagatcttgtgcatcgccgacacgtcttatgaagtcccgtataaatttgaaagcgacgaagaagtatatcagagtgtgaatggattcttggacaatatctcatcaaaacacattgttgaacgtttgcgcaaaatcggcgacaactataacggatacaacttggataaaatttatatcgtatcaaaattttatgaatcagtatcccaaaagacttaccgtgattgggagactattaatacggcgttagaaatccattacaacaacattctgccgggtaacggtaaatcgaaagcggacaaagtgaagaaggcggttaagaacgatcttcagaagtctatcacggagattaatgagctggtttccaattacaagttgtgctcggatgataacatcaaagctgaaacctatatccatgaaatttctcatattcttaataacttcgaggcacaagaattaaaatataacccagaaattcatctggttgagagcgaacttaaagcttcagaattaaaaaatgttttggacgtaattatgaacgccttccattggtgcagcgtgtttatgacagaggagttagtagataaggataacaacttttatgcagaattggaagagatctatgatgagatctatccagtgatttcactgtataacttagtccgtaattacgtcactcagaagccgggctcaactaaaaagatcaagttaaattttggaattccgacattggcggatggttggagtaagtctaaggaatactcaaataacgctattatcttaatgcgtgacaacctgtattacttgggtattttcaatgccaaaaataagcccgataaaaaaatcattgaagggaatacttcagaaaataagggagattacaaaaaaatgatttataaccttttgccaggcccaaacaaaatgatccccaaggtgtttttgagtagtaagacgggagtagaaacatataagccatcagcgtacattcttgaagggtacaaacaaaataaacacatcaagagcagcaaggactttgacattacattttgtcatgacttaatcgactactttaaaaattgcattgccattcaccctgagtggaaaaattttggtttcgacttcagtgatacctctacctatgaagatatctctggtttttatcgtgaggtagaacttcagggttacaagatcgattggacgtacatttccgagaaagacattgatcttttacaagagaagggtcagctttacttatttcagatctacaataaagacttttcgaaaaaatccacgggcaacgacaaccttcatacaatgtacttaaagaacctgttctctgaagaaaacttgaaagatatcgtgcttaaattgaatggcgaggccgagatttttttccgtaaaagctcgattaagaatcccatcatccacaagaaaggcagcattctggtaaatcgtacctatgaagcggaggaaaaggaccaatttggtaatattcagattgtccgtaagaacatccctgaaaatatctatcaagaattatataaatatttcaacgataagtcggacaaggaacttagcgatgaagccgcgaagttgaaaaatgttgttggtcaccacgaagcagcaacaaacattgtgaaagaccgtcgctacacttacgataagtactttttacatatgcctattacgattaactttaaggcaaataagacaggttttatcaacgaccgtatcctgcaatatattgcaaaagagaaggacctgcatgtcattgggattgatcgcggtgaacgcaatctgatttacgtgagtgttattgatacctgcggtaatattgttgagcaaaagtcttttaatatcgttaatggttacgactaccaaattaagcttaaacaacaggaaggtgcccgccagatcgcccgtaaggagtggaaggaaatcggaaaaattaaggaaatcaaagagggatatctgagcttggttattcatgaaatctcaaagatggttattaagtacaacgccatcatcgctatggaagacttatcgtatgggtttaaaaagggtcgtttcaaagttgagcgccaggtctaccaaaagtttgaaacgatgcttattaataaattaaactacttggttttcaaagatatctctattaccgagaatggaggtttactgaaaggataccagttaacgtatatccccgataagcttaaaaacgtgggccatcagtgtggctgtattttctatgtgcccgcggcatatacatcaaaaattgacccgacgacgggtttcgttaatatcttcaagttcaaagatctgacagttgatgcaaaacgcgaattcattaagaagttcgatagtattcgctatgactccgagaaaaatttgttttgcttcacttttgactacaataactttattactcagaatacagtcatgagtaaaagctcctggtcggtttacacgtacggggtacgcatcaaacgtcgttttgtgaatggtcgttttagtaatgagtcggatacaattgatattaccaaggatatggagaagactctggaaatgacagacatcaattggcgtgatggacatgatttgcgtcaggacattatcgactatgagattgtgcagcatattttcgaaatttttcgcctgacggtgcaaatgcgtaattccttaagcgaactggaagatcgcgactatgaccgcttaatttctcctgtgctgaatgagaacaacatcttctatgactcagcgaaagccggggacgctttgccaaaggatgcagatgctaacggtgcatattgtattgctctgaaaggcctttacgagatcaaacaaattactgaaaactggaaggaagatggaaagttttcccgtgataaattgaagatctctaataaggactggtttgactttatccaaaataaacgttattta

SEQ ID NO: 192 - protein, 1263 aa, synthetic construct
MNNGTNNFQNFIGISSLQKTLRNALIPTETTQQFIVKNGIIKEDELRGENRQILKDIMDDYYRGFISETLSSIDDIDWTSLFEKMEIQLKNGDNKDTLIKEQTEYRKAIHKKFANDDRFKNMFSAKLISDILPEFVIHNNNYSASEKEEKTQVIKLFSRFATSFKDYFKNRANCFSADDISSSSCHRIVNDNAEIFFSNALVYRRIVKSLSNDDINKISGDMKDSLKEMSLEEIYSYEKYGEFITQEGISFYNDICGKVNSFMNLYCQKNKENKNLYKLQKLHKQILCIADTSYEVPYKFESDEEVYQSVNGFLDNISSKHIVERLRKIGDNYNGYNLDKIYIVSKFYESVSQKTYRDWETINTALEIHYNNILPGNGKSKADKVKKAVKNDLQKSITEINELVSNYKLCSDDNIKAETYIHEISHILNNFEAQELKYNPEIHLVESELKASELKNVLDVIMNAFHWCSVFMTEELVDKDNNFYAELEEIYDEIYPVISLYNLVRNYVTQKPGSTKKIKLNFGIPTLADGWSKSKEYSNNAIILMRDNLYYLGIFNAKNKPDKKIIEGNTSENKGDYKKMIYNLLPGPNKMIPKVFLSSKTGVETYKPSAYILEGYKQNKHIKSSKDFDITFCHDLIDYFKNCIAIHPEWKNFGFDFSDTSTYEDISGFYREVELQGYKIDWTYISEKDIDLLQEKGQLYLFQIYNKDFSKKSTGNDNLHTMYLKNLFSEENLKDIVLKLNGEAEIFFRKSSIKNPIIHKKGSILVNRTYEAEEKDQFGNIQIVRKNIPENIYQELYKYFNDKSDKELSDEAAKLKNVVGHHEAATNIVKDRRYTYDKYFLHMPITINFKANKTGFINDRILQYIAKEKDLHVIGIDRGERNLIYVSVIDTCGNIVEQKSFNIVNGYDYQIKLKQQEGARQIARKEWKEIGKIKEIKEGYLSLVIHEISKMVIKYNAIIAMEDLSYGFKKGRFKVERQVYQKFETMLINKLNYLVFKDISITENGGLLKGYQLTYIPDKLKNVGHQCGCIFYVPAAYTSKIDPTTGFVNIFKFKDLTVDAKREFIKKFDSIRYDSEKNLFCFTFDYNNFITQNTVMSKSSWSVYTYGVRIKRRFVNGRFSNESDTIDITKDMEKTLEMTDINWRDGHDLRQDIIDYEIVQHIFEIFRLTVQMRNSLSELEDRDYDRLISPVLNENNIFYDSAKAGDALPKDADANGAYCIALKGLYEIKQITENWKEDGKFSRDKLKISNKDWFDFIQNKRYL

SEQ ID NO: 193 - DNA, 3789 bp, synthetic construct
  source 1..3789: mol_type = other DNA
atgaataacggtaccaataactttcaaaattttatcgggatctcctcgttgcaaaaaactcttcgtaatgctttaatcccgactgagacaacacagcagttcatcgttaaaaacggcatcattaaagaagatgagctgcgcggcgagaaccgtcagattttaaaggacatcatggacgactattaccgtgggttcatctcagaaacattaagcagcatcgatgatatcgactggacctcactgtttgagaagatggagattcaacttaagaatggagacaacaaagacactttaattaaggagcagacggaatatcgtaaagctatccataaaaaatttgcaaacgatgaccgtttcaaaaatatgttttccgcaaaattgattagcgacattttacctgaattcgtaatccataacaacaactattccgcatctgaaaaagaggagaagacccaagttatcaaacttttttcacgtttcgcgacatcttttaaagactactttaagaatcgtgcgaattgtttcagtgcagatgatatttcgtctagttcatgtcaccgtatcgtgaatgacaacgctgagattttcttttctaatgcgttggtgtatcgccgcatcgtaaagtccttgtcgaatgatgatatcaacaaaattagtggtgacatgaaagactccctgaaagaaatgtcattagaggagatttacagctacgaaaaatacggagagttcatcactcaggaaggtatctccttttacaacgatatttgcggcaaagttaatagtttcatgaatctgtattgtcagaagaataaggaaaacaagaatctgtacaagttacaaaagcttcataaacagatcttgtgcatcgccgacacgtcttatgaagtcccgtataaatttgaaagcgacgaagaagtatatcagagtgtgaatggattcttggacaatatctcatcaaaacacattgttgaacgtttgcgcaaaatcggcgacaactataacggatacaacttggataaaatttatatcgtatcaaaattttatgaatcagtatcccaaaagacttaccgtgattgggagactattaatacggcgttagaaatccattacaacaacattctgccgggtaacggtaaatcgaaagcggacaaagtgaagaaggcggttaagaacgatcttcagaagtctatcacggagattaatgagctggtttccaattacaagttgtgctcggatgataacatcaaagctgaaacctatatccatgaaatttctcatattcttaataacttcgaggcacaagaattaaaatataacccagaaattcatctggttgagagcgaacttaaagcttcagaattaaaaaatgttttggacgtaattatgaacgccttccattggtgcagcgtgtttatgacagaggagttagtagataaggataacaacttttatgcagaattggaagagatctatgatgagatctatccagtgatttcactgtataacttagtccgtaattacgtcactcagaagccgggctcaactaaaaagatcaagttaaattttggaattccgacattggcggatggttggagtaagtctaaggaatactcaaataacgctattatcttaatgcgtgacaacctgtattacttgggtattttcaatgccaaaaataagcccgataaaaaaatcattgaagggaatacttcagaaaataagggagattacaaaaaaatgatttataaccttttgccaggcccaaacaaaatgatccccaaggtgtttttgagtagtaagacgggagtagaaacatataagccatcagcgtacattcttgaagggtacaaacaaaataaacacatcaagagcagcaaggactttgacattacattttgtcatgacttaatcgactactttaaaaattgcattgccattcaccctgagtggaaaaattttggtttcgacttcagtgatacctctacctatgaagatatctctggtttttatcgtgaggtagaacttcagggttacaagatcgattggacgtacatttccgagaaagacattgatcttttacaagagaagggtcagctttacttatttcagatctacaataaagacttttcgaaaaaatccacgggcaacgacaaccttcatacaatgtacttaaagaacctgttctctgaagaaaacttgaaagatatcgtgcttaaattgaatggcgaggccgagatttttttccgtaaaagctcgattaagaatcccatcatccacaagaaaggcagcattctggtaaatcgtacctatgaagcggaggaaaaggaccaatttggtaatattcagattgtccgtaagaacatccctgaaaatatctatcaagaattatataaatatttcaacgataagtcggacaaggaacttagcgatgaagccgcgaagttgaaaaatgttgttggtcaccacgaagcagcaacaaacattgtgaaagactatcgctacacttacgataagtacctgttacatatgcctattacgattaactttaaggcaaataagacaggttttatcaacgaccgtatcctgcaatatattgcaaaagagaaggacctgcatgtcattgggattgatcgcggtgaacgcaatctgatttacgtgagtgttattgatacctgcggtaatattgttgagcaaaagtcttttaatatcgttaatggttacgactaccaaattaagcttaaacaacaggaaggtgcccgccagatcgcccgtaaggagtggaaggaaatcggaaaaattaaggaaatcaaagagggatatctgagcttggttattcatgaaatctcaaagatggttattaagtacaacgccatcatcgctatggaagacttatcgtatgggtttaaaaagggtcgtttcaaagttgagcgccaggtctaccaaaagtttgaaacgatgcttattaataaattaaactacttggttttcaaagatatctctattaccgagaatggaggtttactgaaaggataccagttaacgtatatccccgataagcttaaaaacgtgggccatcagtgtggctgtattttctatgtgcccgcggcatatacatcaaaaattgacccgacgacgggtttcgttaatatcttcaagttcaaagatctgacagttgatgcaaaacgcgaattcattaagaagttcgatagtattcgctatgactccgagaaaaatttgttttgcttcacttttgactacaataactttattactcagaatacagtcatgagtaaaagctcctggtcggtttacacgtacggggtacgcatcaaacgtcgttttgtgaatggtcgttttagtaatgagtcggatacaattgatattaccaaggatatggagaagactctggaaatgacagacatcaattggcgtgatggacatgatttgcgtcaggacattatcgactatgagattgtgcagcatattttcgaaatttttcgcctgacggtgcaaatgcgtaattccttaagcgaactggaagatcgcgactatgaccgcttaatttctcctgtgctgaatgagaacaacatcttctatgactcagcgaaagccggggacgctttgccaaaggatgcagatgctaacggtgcatattgtattgctctgaaaggcctttacgagatcaaacaaattactgaaaactggaaggaagatggaaagttttcccgtgataaattgaagatctctaataaggactggtttgactttatccaaaataaacgttattta

SEQ ID NO: 194 - protein, 1263 aa, synthetic construct
MNNGTNNFQNFIGISSLQKTLRNALIPTETTQQFIVKNGIIKEDELRGENRQILKDIMDDYYRGFISETLSSIDDIDWTSLFEKMEIQLKNGDNKDTLIKEQTEYRKAIHKKFANDDRFKNMFSAKLISDILPEFVIHNNNYSASEKEEKTQVIKLFSRFATSFKDYFKNRANCFSADDISSSSCHRIVNDNAEIFFSNALVYRRIVKSLSNDDINKISGDMKDSLKEMSLEEIYSYEKYGEFITQEGISFYNDICGKVNSFMNLYCQKNKENKNLYKLQKLHKQILCIADTSYEVPYKFESDEEVYQSVNGFLDNISSKHIVERLRKIGDNYNGYNLDKIYIVSKFYESVSQKTYRDWETINTALEIHYNNILPGNGKSKADKVKKAVKNDLQKSITEINELVSNYKLCSDDNIKAETYIHEISHILNNFEAQELKYNPEIHLVESELKASELKNVLDVIMNAFHWCSVFMTEELVDKDNNFYAELEEIYDEIYPVISLYNLVRNYVTQKPGSTKKIKLNFGIPTLADGWSKSKEYSNNAIILMRDNLYYLGIFNAKNKPDKKIIEGNTSENKGDYKKMIYNLLPGPNKMIPKVFLSSKTGVETYKPSAYILEGYKQNKHIKSSKDFDITFCHDLIDYFKNCIAIHPEWKNFGFDFSDTSTYEDISGFYREVELQGYKIDWTYISEKDIDLLQEKGQLYLFQIYNKDFSKKSTGNDNLHTMYLKNLFSEENLKDIVLKLNGEAEIFFRKSSIKNPIIHKKGSILVNRTYEAEEKDQFGNIQIVRKNIPENIYQELYKYFNDKSDKELSDEAAKLKNVVGHHEAATNIVKDYRYTYDKYLLHMPITINFKANKTGFINDRILQYIAKEKDLHVIGIDRGERNLIYVSVIDTCGNIVEQKSFNIVNGYDYQIKLKQQEGARQIARKEWKEIGKIKEIKEGYLSLVIHEISKMVIKYNAIIAMEDLSYGFKKGRFKVERQVYQKFETMLINKLNYLVFKDISITENGGLLKGYQLTYIPDKLKNVGHQCGCIFYVPAAYTSKIDPTTGFVNIFKFKDLTVDAKREFIKKFDSIRYDSEKNLFCFTFDYNNFITQNTVMSKSSWSVYTYGVRIKRRFVNGRFSNESDTIDITKDMEKTLEMTDINWRDGHDLRQDIIDYEIVQHIFEIFRLTVQMRNSLSELEDRDYDRLISPVLNENNIFYDSAKAGDALPKDADANGAYCIALKGLYEIKQITENWKEDGKFSRDKLKISNKDWFDFIQNKRYL

SEQ ID NO: 195 - DNA, 3789 bp, synthetic construct
  source 1..3789: mol_type = other DNA
atgaataacggtaccaataactttcaaaattttatcgggatctcctcgttgcaaaaaactcttcgtaatgctttaatcccgactgagacaacacagcagttcctggttaaaaacggcatcattaaagaagatgagctgcgcggcgagaaccgtcagattttaaaggacatcatggacgactattaccgtgggttcatctcagaaacattaagcagcatcgatgatatcgactggacctcactgtttgagaagatggagattcaacttaagaatggagacaacaaagacactttaattaaggagcagacggaatatcgtaaagctatccataaaaaatttgcaaacgatgaccgtttcaaaaatatgttttccgcaaaattgattagcgacattttacctgaattcgtaatccataacaacaactattccgcatctgaaaaagaggagaagacccaagttatcaaacttttttcacgtttcgcgacatcttttaaagactactttaagaatcgtgcgaattgtttcagtgcagatgatatttcgtctagttcatgtcaccgtatcgtgaatgacaacgctgagattttcttttctaatgcgttggtgtatcgccgcatcgtaaagtccttgtcgaatgatgatatcaacaaaattagtggtgacatgaaagactccctgaaagaaatgtcattagaggagatttacagctacgaaaaatacggagagttcatcactcaggaaggtatctccttttacaacgatatttgcggcaaagttaatagtttcatgaatctgtattgtcagaagaataaggaaaacaagaatctgtacaagttacaaaagcttcataaacagatcttgtgcatcgccgacacgtcttatgaagtcccgtataaatttgaaagcgacgaagaagtatatcagagtgtgaatggattcttggacaatatctcatcaaaacacattgttgaacgtttgcgcaaaatcggcgacaactataacggatacaacttggataaaatttatatcgtatcaaaattttatgaatcagtatcccaaaagacttaccgtgattgggagactattaatacggcgttagaaatccattacaacaacattctgccgggtaacggtaaatcgaaagcggacaaagtgaagaaggcggttaagaacgatcttcagaagtctatcacggagattaatgagctggtttccaattacaagttgtgctcggatgataacatcaaagctgaaacctatatccatgaaatttctcatattcttaataacttcgaggcacaagaattaaaatataacccagaaattcatctggttgagagcgaacttaaagcttcagaattaaaaaatgttttggacgtaattatgaacgccttccattggtgcaaagtgtttatgacagaggagttagtagataaggataacaacttttatgcagaattggaagagatctatgatgagatctatccagtgatttcactgtataacttagtccgtaattacgtcactcagaagccgtactcaactaaaaagatcaagttaaattttggaattccgacattggcggatggttggagtaagtctaaggaatactcaaataacgctattatcttaatgcgtgacaacctgtattacttgggtattttcaatgccaaaaataagcccgataaaaaaatcattgaagggaatacttcagaaaataagggagattacaaaaaaatgatttataaccttttgccaggcccaaacaaaatgatccccaaggtgtttttgagtagtaagacgggagtagaaacatataagccatcagcgtacattcttgaagggtacaaacaaaataaacacatcaagagcagcaaggactttgacattacattttgtcatgacttaatcgactactttaaaaattgcattgccattcaccctgagtggaaaaattttggtttcgacttcagtgatacctctacctatgaagatatctctggtttttatcgtgaggtagaacttcagggttacaagatcgattggacgtacatttccgagaaagacattgatcttttacaagagaagggtcagctttacttatttcagatctacaataaagacttttcgaaaaaatccacgggcaacgacaaccttcatacaatgtacttaaagaacctgttctctgaagaaaacttgaaagatatcgtgcttaaattgaatggcgaggccgagatttttttccgtaaaagctcgattaagaatcccatcatccacaagaaaggcagcattctggtaaatcgtacctatgaagcggaggaaaaggaccaatttggtaatattcagattgtccgtaagaacatccctgaaaatatctatcaagaattatataaatatttcaacgataagtcggacaaggaacttagcgatgaagccgcgaagttgaaaaatgttgttggtcaccacgaagcagcatttaacattgtgaaagactatcgctacacttacgataagtactttttacatatgcctattacgattaactttaaggcaaataagacaggttttatcaacgaccgtatcctgcaatatattgcaaaagagaaggacctgcatgtcattgggattgatcgcggtgaacgcaatctgatttacgtgagtgttattgatacctgcggtaatattgttgagcaaaagtcttttaatatcgttaatggttacgactaccaaattaagcttaaacaacaggaaggtgcccgccagatcgcccgtaaggagtggaaggaaatcggaaaaattaaggaaatcaaagagggatatctgagcttggttattcatgaaatctcaaagatggttattaagtacaacgccatcatcgctatggaagacttatcgtatgggtttaaaaagggtcgtttcaaagttgagcgccaggtctaccaaaagtttgaaacgatgcttattaataaattaaactacttggttttcaaagatatctctattaccgagaatggaggtttactgaaaggataccagttaacgtatatccccgataagcttaaaaacgtgggccatcagtgtggctgtattttctatgtgcccgcggcatatacatcaaaaattgacccgacgacgggtttcgttaatatcttcaagttcaaagatctgacagttgatgcaaaacgcgaattcattaagaagttcgatagtattcgctatgactccgagaaaaatttgttttgcttcacttttgactacaataactttattactcagaatacagtcatgagtaaaagctcctggtcggtttacacgtacggggtacgcatcaaacgtcgttttgtgaatggtcgttttagtaatgagtcggatacaattgatattaccaaggatatggagaagactctggaaatgacagacatcaattggcgtgatggacatgatttgcgtcaggacattatcgactatgagattgtgcagcatattttcgaaatttttcgcctgacggtgcaaatgcgtaattccttaagcgaactggaagatcgcgactatgaccgcttaatttctcctgtgctgaatgagaacaacatcttctatgactcagcgaaagccggggacgctttgccaaaggatgcagatgctaacggtgcatattgtattgctctgaaaggcctttacgagatcaaacaaattactgaaaactggaaggaagatggaaagttttcccgtgataaattgaagatctctaataaggactggtttgactttatccaaaataaacgttattta

SEQ ID NO: 196 - protein, 1263 aa, synthetic construct; identical to SEQ ID NO: 190

SEQ ID NO: 197 - DNA, 3789 bp, synthetic construct
  source 1..3789: mol_type = other DNA
atgaataacggtaccaataactttcaaaattttatcgggatctcctcgttgcaaaaaactcttcgtaatgctttaatcccgactgagacaacacagcagttcatcgttaaaaacggccagattaaagaagatgagctgcgcggcgagaaccgtcagattttaaaggacatcatggacgactattaccgtgggttcatctcagaaacattaagcagcatcgatgatatcgactggacctcactgtttgagaagatggagattcaacttaagaatggagacaacaaagacactttaattaaggagcagacggaatatcgtaaagctatccataaaaaatttgcaaacgatgaccgtttcaaaaatatgttttccgcaaaattgattagcgacattttacctgaattcgtaatccataacaacaactattccgcatctgaaaaagaggagaagacccaagttatcaaacttttttcacgtttcgcgacatcttttaaagactactttaagaatcgtgcgaattgtttcagtgcagatgatatttcgtctagttcatgtcaccgtatcgtgaatgacaacgctgagattttcttttctaatgcgttggtgtatcgccgcatcgtaaagtccttgtcgaatgatgatatcaacaaaattagtggtgacatgaaagactccctgaaagaaatgtcattagaggagatttacagctacgaaaaatacggagagttcatcactcaggaaggtatctccttttacaacgatatttgcggcaaagttaatagtttcatgaatctgtattgtcagaagaataaggaaaacaagaatctgtacaagttacaaaagcttcataaacagatcttgtgcatcgccgacacgtcttatgaagtcccgtataaatttgaaagcgacgaagaagtatatcagagtgtgaatggattcttggacaatatctcatcaaaacacattgttgaacgtttgcgcaaaatcggcgacaactataacggatacaacttggataaaatttatatcgtatcaaaattttatgaatcagtatcccaaaagacttaccgtgattgggagactattaatacggcgttagaaatccattacaacaacattctgccgggtaacggtaaatcgaaagcggacaaagtgaagaaggcggttaagaacgatcttcagaagtctatcacggagattaatgagctggtttccaattacaagttgtgctcggatgataacatcaaagctgaaacctatatccatgaaatttctcatattcttaataacttcgaggcacaagaattaaaatataacccagaaattcatctggttgagagcgaacttaaagcttcagaattaaaaaatgttttggacgtaattatgaacgccttccattggtgcaaagtgtttatgacagaggagttagtagataaggataacaacttttatgcagaattggaagagatctatgatgagatctatccagtgatttcactgtataacttagtccgtaattacgtcactcagaagccgtactcaactaaaaagatcaagttaaattttggaattccgacattggcggatggttggagtaagtctaaggaatactcaaataacgctattatcttaatgcgtgacaacctgtattacttgggtattttcaatgccaaaaataagcccgataaaaaaatcattgaagggaatacttcagaaaataagggagattacaaaaaaatgatttataaccttttgccaggcccaaacaaaatgatccccaaggtgtttttgagtagtaagacgggagtagaaacatataagccatcagcgtacattcttgaagggtacaaacaaaataaacacatcaagagcagcaaggactttgacattacattttgtcatgacttaatcgactactttaaaaattgcattgccattcaccctgagtggaaaaattttggtttcgacttcagtgatacctctacctatgaagatatctctggtttttatcgtgaggtagaacttcagggttacaagatcgattggacgtacatttccgagaaagacattgatcttttacaagagaagggtcagctttacttatttcagatctacaataaagacttttcgaaaaaatccacgggcaacgacaaccttcatacaatgtacttaaagaacctgttctctgaagaaaacttgaaagatatcgtgcttaaattgaatggcgaggccgagatttttttccgtaaaagctcgattaagaatcccatcatccacaagaaaggcagcattctggtaaatcgtacctatgaagcggaggaaaaggaccaatttggtaatattcagattgtccgtaagaacatccctgaaaatatctatcaagaattatataaatatttcaacgataagtcggacaaggaacttagcgatgaagccgcgaagttgaaaaatgttgttggtcaccacgaagcagcatttaacattgtgaaagactatcgctacacttacgataagtactttttacatatgcctattacgattaactttaaggcaaataagacaggttttatcaacgaccgtatcctgcaatatattgcaaaagagaaggacctgcatgtcattgggattgatcgcggtgaacgcaatctgatttacgtgagtgttattgatacctgcggtaatattgttgagcaaaagtcttttaatatcgttaatggttacgactaccaaattaagcttaaacaacaggaaggtgcccgccagatcgcccgtaaggagtggaaggaaatcggaaaaattaaggaaatcaaagagggatatctgagcttggttattcatgaaatctcaaagatggttattaagtacaacgccatcatcgctatggaagacttatcgtatgggtttaaaaagggtcgtttcaaagttgagcgccaggtctaccaaaagtttgaaacgatgcttattaataaattaaactacttggttttcaaagatatctctattaccgagaatggaggtttactgaaaggataccagttaacgtatatccccgataagcttaaaaacgtgggccatcagtgtggctgtattttctatgtgcccgcggcatatacatcaaaaattgacccgacgacgggtttcgttaatatcttcaagttcaaagatctgacagttgatgcaaaacgcgaattcattaagaagttcgatagtattcgctatgactccgagaaaaatttgttttgcttcacttttgactacaataactttattactcagaatacagtcatgagtaaaagctcctggtcggtttacacgtacggggtacgcatcaaacgtcgttttgtgaatggtcgttttagtaatgagtcggatacaattgatattaccaaggatatggagaagactctggaaatgacagacatcaattggcgtgatggacatgatttgcgtcaggacattatcgactatgagattgtgcagcatattttcgaaatttttcgcctgacggtgcaaatgcgtaattccttaagcgaactggaagatcgcgactatgaccgcttaatttctcctgtgctgaatgagaacaacatcttctatgactcagcgaaagccggggacgctttgccaaaggatgcagatgctaacggtgcatattgtattgctctgaaaggcctttacgagatcaaacaaattactgaaaactggaaggaagatggaaagttttcccgtgataaattgaagatctctaataaggactggtttgactttatccaaaataaacgttattta

SEQ ID NO: 198 - protein, 1263 aa, synthetic construct
MNNGTNNFQNFIGISSLQKTLRNALIPTETTQQFIVKNGQIKEDELRGENRQILKDIMDDYYRGFISETLSSIDDIDWTSLFEKMEIQLKNGDNKDTLIKEQTEYRKAIHKKFANDDRFKNMFSAKLISDILPEFVIHNNNYSASEKEEKTQVIKLFSRFATSFKDYFKNRANCFSADDISSSSCHRIVNDNAEIFFSNALVYRRIVKSLSNDDINKISGDMKDSLKEMSLEEIYSYEKYGEFITQEGISFYNDICGKVNSFMNLYCQKNKENKNLYKLQKLHKQILCIADTSYEVPYKFESDEEVYQSVNGFLDNISSKHIVERLRKIGDNYNGYNLDKIYIVSKFYESVSQKTYRDWETINTALEIHYNNILPGNGKSKADKVKKAVKNDLQKSITEINELVSNYKLCSDDNIKAETYIHEISHILNNFEAQELKYNPEIHLVESELKASELKNVLDVIMNAFHWCKVFMTEELVDKDNNFYAELEEIYDEIYPVISLYNLVRNYVTQKPYSTKKIKLNFGIPTLADGWSKSKEYSNNAIILMRDNLYYLGIFNAKNKPDKKIIEGNTSENKGDYKKMIYNLLPGPNKMIPKVFLSSKTGVETYKPSAYILEGYKQNKHIKSSKDFDITFCHDLIDYFKNCIAIHPEWKNFGFDFSDTSTYEDISGFYREVELQGYKIDWTYISEKDIDLLQEKGQLYLFQIYNKDFSKKSTGNDNLHTMYLKNLFSEENLKDIVLKLNGEAEIFFRKSSIKNPIIHKKGSILVNRTYEAEEKDQFGNIQIVRKNIPENIYQELYKYFNDKSDKELSDEAAKLKNVVGHHEAAFNIVKDYRYTYDKYFLHMPITINFKANKTGFINDRILQYIAKEKDLHVIGIDRGERNLIYVSVIDTCGNIVEQKSFNIVNGYDYQIKLKQQEGARQIARKEWKEIGKIKEIKEGYLSLVIHEISKMVIKYNAIIAMEDLSYGFKKGRFKVERQVYQKFETMLINKLNYLVFKDISITENGGLLKGYQLTYIPDKLKNVGHQCGCIFYVPAAYTSKIDPTTGFVNIFKFKDLTVDAKREFIKKFDSIRYDSEKNLFCFTFDYNNFITQNTVMSKSSWSVYTYGVRIKRRFVNGRFSNESDTIDITKDMEKTLEMTDINWRDGHDLRQDIIDYEIVQHIFEIFRLTVQMRNSLSELEDRDYDRLISPVLNENNIFYDSAKAGDALPKDADANGAYCIALKGLYEIKQITENWKEDGKFSRDKLKISNKDWFDFIQNKRYL

SEQ ID NO: 199 - DNA, 3789 bp, synthetic construct
  source 1..3789: mol_type = other DNA
atgaataacggtaccaataactttcaaaattttatcgggatctcctcgttgcaaaaaactcttcgtaatgctttaatcccgactgagacaacacagcagttcatcgttaaaaacggcatcattaaagaagatgagctgcgcggcgagaaccgtcagattttaaaggacatcatggacgactattaccgtgggttcatctcagaaacattaagcagcatcgatgatatcgactggacctcactgtttgagaagatggagattcaacttaagaatggagacaacaaagacactttaattaaggagcagacggaatatcgtaaagctatccataaaaaatttgcaaacgatgaccgtttcaaaaatatgttttccgcaaaattgattagcgacattttacctgaattcgtaatccataacaacaactattccgcatctgaaaaagaggagaagacccaagttatcaaacttttttcacgtttcgcgacatcttttaaagactactttaagaatcgtgcgaattgtttcagtgcagatgatatttcgtctagttcatgtcaccgtatcgtgaatgacaacgctgagattttcttttctaatgcgttggtgtatcgccgcatcgtaaagtccttgtcgaatgatgatatcaacaaaattagtggtgacatgaaagactccctgaaagaaatgtcattagaggagatttacagctacgaaaaatacggagagttcatcactcaggaaggtatctccttttacaacgatatttgcggcaaagttaatagtttcatgaatctgtattgtcagaagaataaggaaaacaagaatctgtacaagttacaaaagcttcataaacagatcttgtgcatcgccgacacgtcttatgaagtcccgtataaatttgaaagcgacgaagaagtatatcagagtgtgaatggattcttggacaatatctcatcaaaacacattgttgaacgtttgcgcaaaatcggcgacaactataacggatacaacttggataaaatttatatcgtatcaaaattttatgaatcagtatcccaaaagacttaccgtgattgggagactattaatacggcgttagaaatccattacaacaacattctgccgggtaacggtaaatcgaaagcggacaaagtgaagaaggcggttaagaacgatcttcagaagtctatcacggagattaatgagctggtttccaattacaagttgtgctcggatgataacatcaaagctgaaacctatatccatgaaatttctcatattcttaataacttcgaggcacaagaattaaaatataacccagaaattcatctggttgagagcgaacttaaagcttcagaattaaaaaatgttttggacgtaattatgaacgccttccattggtgcaaagtgtttatgacagaggagttagtagataaggataacaacttttatgcagaattggaagagatctatgatgagatctatccagtgatttcactgtataacttagtccgtaattacgtcactcagaagccgtactcaactccgaagatcaagttaaattttggaattccgacattggcggatggttggagtaagtctaaggaatactcaaataacgctattatcttaatgcgtgacaacctgtattacttgggtattttcaatgccaaaaataagcccgataaaaaaatcattgaagggaatacttcagaaaataagggagattacaaaaaaatgatttataaccttttgccaggcccaaacaaaatgatccccaaggtgtttttgagtagtaagacgggagtagaaacatataagccatcagcgtacattcttgaagggtacaaacaaaataaacacatcaagagcagcaaggactttgacattacattttgtcatgacttaatcgactactttaaaaattgcattgccattcaccctgagtggaaaaattttggtttcgacttcagtgatacctctacctatgaagatatctctggtttttatcgtgaggtagaacttcagggttacaagatcgattggacgtacatttccgagaaagacattgatcttttacaagagaagggtcagctttacttatttcagatctacaataaagacttttcgaaaaaatccacgggcaacgacaaccttcatacaatgtacttaaagaacctgttctctgaagaaaacttgaaagatatcgtgcttaaattgaatggcgaggccgagatttttttccgtaaaagctcgattaagaatcccatcatccacaagaaaggcagcattctggtaaatcgtacctatgaagcggaggaaaaggaccaatttggtaatattcagattgtccgtaagaacatccctgaaaatatctatcaagaattatataaatatttcaacgataagtcggacaaggaacttagcgatgaagccgcgaagttgaaaaatgttgttggtcaccacgaagcagcatttaacattgtgaaagactatcgctacacttacgataagtactttttacatatgcctattacgattaactttaaggcaaataagacaggttttatcaacgaccgtatcctgcaatatattgcaaaagagaaggacctgcatgtcattgggattgatcgcggtgaacgcaatctgatttacgtgagtgttattgatacctgcggtaatattgttgagcaaaagtcttttaatatcgttaatggttacgactaccaaattaagcttaaacaacaggaaggtgcccgccagatcgcccgtaaggagtggaaggaaatcggaaaaattaaggaaatcaaagagggatatctgagcttggttattcatgaaatctcaaagatggttattaagtacaacgccatcatcgctatggaagacttatcgtatgggtttaaaaagggtcgtttcaaagttgagcgccaggtctaccaaaagtttgaaacgatgcttattaataaattaaactacttggttttcaaagatatctctattaccgagaatggaggtttactgaaaggataccagttaacgtatatccccgataagcttaaaaacgtgggccatcagtgtggctgtattttctatgtgcccgcggcatatacatcaaaaattgacccgacgacgggtttcgttaatatcttcaagttcaaagatctgacagttgatgcaaaacgcgaattcattaagaagttcgatagtattcgctatgactccgagaaaaatttgttttgcttcacttttgactacaataactttattactcagaatacagtcatgagtaaaagctcctggtcggtttacacgtacggggtacgcatcaaacgtcgttttgtgaatggtcgttttagtaatgagtcggatacaattgatattaccaaggatatggagaagactctggaaatgacagacatcaattggcgtgatggacatgatttgcgtcaggacattatcgactatgagattgtgcagcatattttcgaaatttttcgcctgacggtgcaaatgcgtaattccttaagcgaactggaagatcgcgactatgaccgcttaatttctcctgtgctgaatgagaacaacatcttctatgactcagcgaaagccggggacgctttgccaaaggatgcagatgctaacggtgcatattgtattgctctgaaaggcctttacgagatcaaacaaattactgaaaactggaaggaagatggaaagttttcccgtgataaattgaagatctctaataaggactggtttgactttatccaaaataaacgttattta

SEQ ID NO: 200 - protein, 1263 aa, synthetic construct
MNNGTNNFQNFIGISSLQKTLRNALIPTETTQQFIVKNGIIKEDELRGENRQILKDIMDDYYRGFISETLSSIDDIDWTSLFEKMEIQLKNGDNKDTLIKEQTEYRKAIHKKFANDDRFKNMFSAKLISDILPEFVIHNNNYSASEKEEKTQVIKLFSRFATSFKDYFKNRANCFSADDISSSSCHRIVNDNAEIFFSNALVYRRIVKSLSNDDINKISGDMKDSLKEMSLEEIYSYEKYGEFITQEGISFYNDICGKVNSFMNLYCQKNKENKNLYKLQKLHKQILCIADTSYEVPYKFESDEEVYQSVNGFLDNISSKHIVERLRKIGDNYNGYNLDKIYIVSKFYESVSQKTYRDWETINTALEIHYNNILPGNGKSKADKVKKAVKNDLQKSITEINELVSNYKLCSDDNIKAETYIHEISHILNNFEAQELKYNPEIHLVESELKASELKNVLDVIMNAFHWCKVFMTEELVDKDNNFYAELEEIYDEIYPVISLYNLVRNYVTQKPYSTPKIKLNFGIPTLADGWSKSKEYSNNAIILMRDNLYYLGIFNAKNKPDKKIIEGNTSENKGDYKKMIYNLLPGPNKMIPKVFLSSKTGVETYKPSAYILEGYKQNKHIKSSKDFDITFCHDLIDYFKNCIAIHPEWKNFGFDFSDTSTYEDISGFYREVELQGYKIDWTYISEKDIDLLQEKGQLYLFQIYNKDFSKKSTGNDNLHTMYLKNLFSEENLKDIVLKLNGEAEIFFRKSSIKNPIIHKKGSILVNRTYEAEEKDQFGNIQIVRKNIPENIYQELYKYFNDKSDKELSDEAAKLKNVVGHHEAAFNIVKDYRYTYDKYFLHMPITINFKANKTGFINDRILQYIAKEKDLHVIGIDRGERNLIYVSVIDTCGNIVEQKSFNIVNGYDYQIKLKQQEGARQIARKEWKEIGKIKEIKEGYLSLVIHEISKMVIKYNAIIAMEDLSYGFKKGRFKVERQVYQKFETMLINKLNYLVFKDISITENGGLLKGYQLTYIPDKLKNVGHQCGCIFYVPAAYTSKIDPTTGFVNIFKFKDLTVDAKREFIKKFDSIRYDSEKNLFCFTFDYNNFITQNTVMSKSSWSVYTYGVRIKRRFVNGRFSNESDTIDITKDMEKTLEMTDINWRDGHDLRQDIIDYEIVQHIFEIFRLTVQMRNSLSELEDRDYDRLISPVLNENNIFYDSAKAGDALPKDADANGAYCIALKGLYEIKQITENWKEDGKFSRDKLKISNKDWFDFIQNKRYL

SEQ ID NO: 201 - DNA, 3789 bp, synthetic construct
  source 1..3789: mol_type = other DNA
atgaataacggtaccaataactttcaaaattttatcgggatctcctcgttgcaaaaaactcttcgtaatgctttaatcccgactgagacaacacagcagttcatcgttaaaaacggcatcattaaagaagatgagctgcgcggcgagaaccgtcagattttaaaggacatcatggacgactattaccgtgggttcatctcagaaacattaagcagcatcgatgatatcgactggacctcactgtttgagaagatggagattcaacttaagaatggagacaacaaagacactttaattaaggagcagacggaatatcgtaaagctatccataaaaaatttgcaaacgatgaccgtttcaaaaatatgttttccgcaaaattgattagcgacattttacctgaattcgtaatccataacaacaactattccgcatctgaaaaagaggagaagacccaagttatcaaacttttttcacgtttcgcgacatcttttaaagactactttaagaatcgtgcgaattgtttcagtgcagatgatatttcgtctagttcatgtcaccgtatcgtgaatgacaacgctgagattttcttttctaatgcgttggtgtatcgccgcatcgtaaagtccttgtcgaatgatgatatcaacaaaattagtggtgacatgaaagactccctgaaagaaatgtcattagaggagatttacagctacgaaaaatacggagagttcatcactcaggaaggtatctccttttacaacgatatttgcggcaaagttaatagtttcatgaatctgtattgtcagaagaataaggaaaacaagaatctgtacaagttacaaaagcttcataaacagatcttgtgcatcgccgacacgtcttatgaagtcccgtataaatttgaaagcgacgaagaagtatatcagagtgtgaatggattcttggacaatatctcatcaaaacacattgttgaacgtttgcgcaaaatcggcgacaactataacggatacaacttggataaaatttatatcgtatcaaaattttatgaatcagtatcccaaaagacttaccgtgattgggagactattaatacggcgttagaaatccattacaacaacattctgccgggtaacggtaaatcgaaagcggacaaagtgaagaaggcggttaagaacgatcttcagaagtctatcacggagattaatgagctggtttccaattacaagttgtgctcggatgataacatcaaagctgaaacctatatccatgaaatttctcatattcttaataacttcgaggcacaagaattaaaatataacccagaaattcatctggttgagagcgaacttaaagcttcagaattaaaaaatgttttggacgtaattatgaacgccttccattggtgcaaagtgtttatgacagaggagttagtagataaggataacaacttttatgcagaattggaagagatctatgatgagatctatccagtgatttcactgtataacttagtccgtaattacgtcactcagaagccgtactcaactaaaaagatcaagttaaattttggaattccgacattggcggatggttggagtaagtctaaggaatactcaaataacgctattatcttaatgcgtgacaacctgtattacttgggtattttcaatgccaaaaataagcccgataaaaaaatcattgaagggaatacttcagaaaataagggagattacaaaaaaatgatttataaccttttgccaggcccaaacaaaatgatccccaaggtgtttttgagtagtaagacgggagtagaaacatataagccatcagcgtacattcttgaagggtacaaacaaaataaacacatcaagagcagcaaggactttgacattacattttgtcatgacttaatcgactactttaaaaattgcattgccattcaccctgagtggaaaaattttggtttcgacttcagtgatacctctacctatgaagatatctctggtttttatcgtgaggtagaacttcagggttacaagatcgattggacgtacatttccgagaaagacattgatcttttacaagagaagggtcagctttacttatttcagatctacaataaagacttttcgaaaaaatccacgggcaacgacaaccttcatacaatgtacttaaagaacctgttctctgaagaaaacttgaaagatatcgtgcttaaattgaatggcgaggccgagatttttttccgtaaaagctcgattaagaatcccatcatccacaagaaaggcagcattctggtaaatcgtacctatgaagcggaggaaaaggaccaatttggtaatattcagattgtccgtaagaacatccctgaaaatatctatcaagaattatataaatatttcaacgataagtcggacaaggaacttagcgatgaagccgcgaagttgaaaaatgttgttggtcaccacgaagcagcatttaacattgtgaaagactatcgctacacttacgataagtacctgttacatatgcctattacgattaactttaaggcaaataagacaggttttatcaacgaccgtatcctgcaatatattgcaaaagagaaggacctgcatgtcattgggattgatcgcggtgaacgcaatctgatttacgtgagtgttattgatacctgcggtaatattgttgagcaaaagtcttttaatatcgttaatggttacgactaccaaattaagcttaaacaacaggaaggtgcccgccagatcgcccgtaaggagtggaaggaaatcggaaaaattaaggaaatcaaagagggatatctgagcttggttattcatgaaatctcaaagatggttattaagtacaacgccatcatcgctatggaagacttatcgtatgggtttaaaaagggtcgtttcaaagttgagcgccaggtctaccaaaagtttgaaacgatgcttattaataaattaaactacttggttttcaaagatatctctattaccgagaatggaggtttactgaaaggataccagttaacgtatatccccgataagcttaaaaacgtgggccatcagtgtggctgtattttctatgtgcccgcggcatatacatcaaaaattgacccgacgacgggtttcgttaatatcttcaagttcaaagatctgacagttgatgcaaaacgcgaattcattaagaagttcgatagtattcgctatgactccgagaaaaatttgttttgcttcacttttgactacaataactttattactcagaatacagtcatgagtaaaagctcctggtcggtttacacgtacggggtacgcatcaaacgtcgttttgtgaatggtcgttttagtaatgagtcggatacaattgatattaccaaggatatggagaagactctggaaatgacagacatcaattggcgtgatggacatgatttgcgtcaggacattatcgactatgagattgtgcagcatattttcgaaatttttcgcctgacggtgcaaatgcgtaattccttaagcgaactggaagatcgcgactatgaccgcttaatttctcctgtgctgaatgagaacaacatcttctatgactcagcgaaagccggggacgctttgccaaaggatgcagatgctaacggtgcatattgtattgctctgaaaggcctttacgagatcaaacaaattactgaaaactggaaggaagatggaaagttttcccgtgataaattgaagatctctaataaggactggtttgactttatccaaaataaacgttattta

SEQ ID NO: 202 - protein, 1263 aa, synthetic construct
MNNGTNNFQNFIGISSLQKTLRNALIPTETTQQFIVKNGIIKEDELRGENRQILKDIMDDYYRGFISETLSSIDDIDWTSLFEKMEIQLKNGDNKDTLIKEQTEYRKAIHKKFANDDRFKNMFSAKLISDILPEFVIHNNNYSASEKEEKTQVIKLFSRFATSFKDYFKNRANCFSADDISSSSCHRIVNDNAEIFFSNALVYRRIVKSLSNDDINKISGDMKDSLKEMSLEEIYSYEKYGEFITQEGISFYNDICGKVNSFMNLYCQKNKENKNLYKLQKLHKQILCIADTSYEVPYKFESDEEVYQSVNGFLDNISSKHIVERLRKIGDNYNGYNLDKIYIVSKFYESVSQKTYRDWETINTALEIHYNNILPGNGKSKADKVKKAVKNDLQKSITEINELVSNYKLCSDDNIKAETYIHEISHILNNFEAQELKYNPEIHLVESELKASELKNVLDVIMNAFHWCKVFMTEELVDKDNNFYAELEEIYDEIYPVISLYNLVRNYVTQKPYSTKKIKLNFGIPTLADGWSKSKEYSNNAIILMRDNLYYLGIFNAKNKPDKKIIEGNTSENKGDYKKMIYNLLPGPNKMIPKVFLSSKTGVETYKPSAYILEGYKQNKHIKSSKDFDITFCHDLIDYFKNCIAIHPEWKNFGFDFSDTSTYEDISGFYREVELQGYKIDWTYISEKDIDLLQEKGQLYLFQIYNKDFSKKSTGNDNLHTMYLKNLFSEENLKDIVLKLNGEAEIFFRKSSIKNPIIHKKGSILVNRTYEAEEKDQFGNIQIVRKNIPENIYQELYKYFNDKSDKELSDEAAKLKNVVGHHEAAFNIVKDYRYTYDKYLLHMPITINFKANKTGFINDRILQYIAKEKDLHVIGIDRGERNLIYVSVIDTCGNIVEQKSFNIVNGYDYQIKLKQQEGARQIARKEWKEIGKIKEIKEGYLSLVIHEISKMVIKYNAIIAMEDLSYGFKKGRFKVERQVYQKFETMLINKLNYLVFKDISITENGGLLKGYQLTYIPDKLKNVGHQCGCIFYVPAAYTSKIDPTTGFVNIFKFKDLTVDAKREFIKKFDSIRYDSEKNLFCFTFDYNNFITQNTVMSKSSWSVYTYGVRIKRRFVNGRFSNESDTIDITKDMEKTLEMTDINWRDGHDLRQDIIDYEIVQHIFEIFRLTVQMRNSLSELEDRDYDRLISPVLNENNIFYDSAKAGDALPKDADANGAYCIALKGLYEIKQITENWKEDGKFSRDKLKISNKDWFDFIQNKRYL

SEQ ID NO: 203 - DNA, 3789 bp, synthetic construct
  source 1..3789: mol_type = other DNA
atgaataacggtaccaataactttcaaaattttatcgggatctcctcgttgcaaaaaactcttcgtaatgctttaatcccgactgagacaacacagcagttcatcgttaaaaacggcatcattaaagaagatgagctgcgcggcgagaaccgtcagattttaaaggacatcatggacgactattaccgtgggttcatctcagaaacattaagcagcatcgatgatatcgactggacctcactgtttgagaagatggagattcaacttaagaatggagacaacaaagacactttaattaaggagcagacggaatatcgtaaagctatccataaaaaatttgcaaacgatgaccgtttcaaaaatatgttttccgcaaaattgattagcgacattttacctgaattcgtaatccataacaacaactattccgcatctgaaaaagaggagaagacccaagttatcaaacttttttcacgtttcgcgacatcttttaaagactactttaagaatcgtgcgaattgtttcagtgcagatgatatttcgtctagttcatgtcaccgtatcgtgaatgacaacgctgagattttcttttctaatgcgttggtgtatcgccgcatcgtaaagtccttgtcgaatgatgatatcaacaaaattagtggtgacatgaaagactccctgaaagaaatgtcattagaggagatttacagctacgaaaaatacggagagttcatcactcaggaaggtatctccttttacaacgatatttgcggcaaagttaatagtttcatgaatctgtattgtcagaagaataaggaaaacaagaatctgtacaagttacaaaagcttcataaacagatcttgtgcatcgccgacacgtcttatgaagtcccgtataaatttgaaagccgtgaagaagtatatcagagtgtgaatggattcttggacaatatctcatcaaaacacattgttgaacgtttgcgcaaaatcggcgacaactataacggatacaacttggataaaatttatatcgtatcaaaattttatgaatcagtatcccaaaagacttaccgtgattgggagactattaatacggcgttagaaatccattacaacaacattctgccgggtaacggtaaatcgaaagcggacaaagtgaagaaggcggttaagaacgatcttcagaagtctatcacggagattaatgagctggtttccaattacaagttgtgctcggatgataacatcaaagctgaaacctatatccatgaaatttctcatattcttaataacttcgaggcacaagaattaaaatataacccagaaattcatctggttgagagcgaacttaaagcttcagaattaaaaaatgttttggacgtaattatgaacgccttccattggtgcaaagtgtttatgacagaggagttagtagataaggataacaacttttatgcagaattggaagagatctatgatgagatctatccagtgatttcactgtataacttagtccgtaattacgtcactcagaagccgtactcaactaaaaagatcaagttaaattttggaattccgacattggcggatggttggagtaagtctaaggaatactcaaataacgctattatcttaatgcgtgacaacctgtattacttgggtattttcaatgccaaaaataagcccgataaaaaaatcattgaagggaatacttcagaaaataagggagattacaaaaaaatgatttataaccttttgccaggcccaaacaaaatgatccccaaggtgtttttgagtagtaagacgggagtagaaacatataagccatcagcgtacattcttgaagggtacaaacaaaataaacacatcaagagcagcaaggactttgacattacattttgtcatgacttaatcgactactttaaaaattgcattgccattcaccctgagtggaaaaattttggtttcgacttcagtgatacctctacctatgaagatatctctggtttttatcgtgaggtagaacttcagggttacaagatcgattggacgtacatttccgagaaagacattgatcttttacaagagaagggtcagctttacttatttcagatctacaataaagacttttcgaaaaaatccacgggcaacgacaaccttcatacaatgtacttaaagaacctgttctctgaagaaaacttgaaagatatcgtgcttaaattgaatggcgaggccgagatttttttccgtaaaagctcgattaagaatcccatcatccacaagaaaggcagcattctggtaaatcgtacctatgaagcggaggaaaaggaccaatttggtaatattcagattgtccgtaagaacatccctgaaaatatctatcaagaattatataaatatttcaacgataagtcggacaaggaacttagcgatgaagccgcgaagttgaaaaatgttgttggtcaccacgaagcagcatttaacattgtgaaagactatcgctacacttacgataagtacctgttacatatgcctattacgattaactttaaggcaaataagacaggttttatcaacgaccgtatcctgcaatatattgcaaaagagaaggacctgcatgtcattgggattgatcgcggtgaacgcaatctgatttacgtgagtgttattgatacctgcggtaatattgttgagcaaaagtcttttaatatcgttaatggttacgactaccaaattaagcttaaacaacaggaaggtgcccgccagatcgcccgtaaggagtggaaggaaatcggaaaaattaaggaaatcaaagagggatatctgagcttggttattcatgaaatctcaaagatggttattaagtacaacgccatcatcgctatggaagacttatcgtatgggtttaaaaagggtcgtttcaaagttgagcgccaggtctaccaaaagtttgaaacgatgcttattaataaattaaactacttggttttcaaagatatctctattaccgagaatggaggtttactgaaaggataccagttaacgtatatccccgataagcttaaaaacgtgggccatcagtgtggctgtattttctatgtgcccgcggcatatacatcaaaaattgacccgacgacgggtttcgttaatatcttcaagttcaaagatctgacagttgatgcaaaacgcgaattcattaagaagttcgatagtattcgctatgactccgagaaaaatttgttttgcttcacttttgactacaataactttattactcagaatacagtcatgagtaaaagctcctggtcggtttacacgtacggggtacgcatcaaacgtcgttttgtgaatggtcgttttagtaatgagtcggatacaattgatattaccaaggatatggagaagactctggaaatgacagacatcaattggcgtgatggacatgatttgcgtcaggacattatcgactatgagattgtgcagcatattttcgaaatttttcgcctgacggtgcaaatgcgtaattccttaagcgaactggaagatcgcgactatgaccgcttaatttctcctgtgctgaatgagaacaacatcttctatgactcagcgaaagccggggacgctttgccaaaggatgcagatgctaacggtgcatattgtattgctctgaaaggcctttacgagatcaaacaaattactgaaaactggaaggaagatggaaagttttcccgtgataaattgaagatctctaataaggactggtttgactttatccaaaataaacgttattta

SEQ ID NO: 204 - protein, 1263 aa, synthetic construct
MNNGTNNFQNFIGISSLQKTLRNALIPTETTQQFIVKNGIIKEDELRGENRQILKDIMDDYYRGFISETLSSIDDIDWTSLFEKMEIQLKNGDNKDTLIKEQTEYRKAIHKKFANDDRFKNMFSAKLISDILPEFVIHNNNYSASEKEEKTQVIKLFSRFATSFKDYFKNRANCFSADDISSSSCHRIVNDNAEIFFSNALVYRRIVKSLSNDDINKISGDMKDSLKEMSLEEIYSYEKYGEFITQEGISFYNDICGKVNSFMNLYCQKNKENKNLYKLQKLHKQILCIADTSYEVPYKFESREEVYQSVNGFLDNISSKHIVERLRKIGDNYNGYNLDKIYIVSKFYESVSQKTYRDWETINTALEIHYNNILPGNGKSKADKVKKAVKNDLQKSITEINELVSNYKLCSDDNIKAETYIHEISHILNNFEAQELKYNPEIHLVESELKASELKNVLDVIMNAFHWCKVFMTEELVDKDNNFYAELEEIYDEIYPVISLYNLVRNYVTQKPYSTKKIKLNFGIPTLADGWSKSKEYSNNAIILMRDNLYYLGIFNAKNKPDKKIIEGNTSENKGDYKKMIYNLLPGPNKMIPKVFLSSKTGVETYKPSAYILEGYKQNKHIKSSKDFDITFCHDLIDYFKNCIAIHPEWKNFGFDFSDTSTYEDISGFYREVELQGYKIDWTYISEKDIDLLQEKGQLYLFQIYNKDFSKKSTGNDNLHTMYLKNLFSEENLKDIVLKLNGEAEIFFRKSSIKNPIIHKKGSILVNRTYEAEEKDQFGNIQIVRKNIPENIYQELYKYFNDKSDKELSDEAAKLKNVVGHHEAAFNIVKDYRYTYDKYLLHMPITINFKANKTGFINDRILQYIAKEKDLHVIGIDRGERNLIYVSVIDTCGNIVEQKSFNIVNGYDYQIKLKQQEGARQIARKEWKEIGKIKEIKEGYLSLVIHEISKMVIKYNAIIAMEDLSYGFKKGRFKVERQVYQKFETMLINKLNYLVFKDISITENGGLLKGYQLTYIPDKLKNVGHQCGCIFYVPAAYTSKIDPTTGFVNIFKFKDLTVDAKREFIKKFDSIRYDSEKNLFCFTFDYNNFITQNTVMSKSSWSVYTYGVRIKRRFVNGRFSNESDTIDITKDMEKTLEMTDINWRDGHDLRQDIIDYEIVQHIFEIFRLTVQMRNSLSELEDRDYDRLISPVLNENNIFYDSAKAGDALPKDADANGAYCIALKGLYEIKQITENWKEDGKFSRDKLKISNKDWFDFIQNKRYL

SEQ ID NO: 205 - DNA, 3789 bp, synthetic construct
  source 1..3789: mol_type = other DNA
atgaataacggtaccaataactttcaaaattttatcgggatctcctcgttgcaaaaaactcttcgtaatgctttaatcccgactgagacaacacagcagttcatcgttaaaaacggcatcattaaagaagatgagctgcgcggcgagaaccgtcagattttaaaggacatcatggacgactattaccgtgggttcatctcagaaacattaagcagcatcgatgatatcgactggacctcactgtttgagaagatggagattcaacttaagaatggagacaacaaagacactttaattaaggagcagacggaatatcgtaaagctatccataaaaaatttgcaaacgatgaccgtttcaaaaatatgttttccgcaaaattgattagcgacattttacctgaattcgtaatccataacaacaactattccgcatctgaaaaagaggagaagacccaagttatcaaacttttttcacgtttcgcgacatcttttaaagactactttaagaatcgtgcgaattgtttcagtgcagatgatatttcgtctagttcatgtcaccgtatcgtgaatgacaacgctgagattttcttttctaatgcgttggtgtatcgccgcatcgtaaagtccttgtcgaatgatgatatcaacaaaattagtggtgacatgaaagactccctgaaagaaatgtcattagaggagatttacagctacgaaaaatacggagagttcatcactcaggaaggtatctccttttacaacgatatttgcggcaaagttaatagtttcatgaatctgtattgtcagaagaataaggaaaacaagaatctgtacaagttacaaaagcttcataaacagatcttgtgcatcgccgacacgtcttatgaagtcccgtataaatttgaaagcgacgaagaagtatatcagagtgtgaatggattcttggacaatatctcatcaaaacacattgttgaacgtttgcgcaaaatcggcgacaactataacggatacaacttggataaaatttatatcgtatcaaaattttatgaatcagtatcccaaaagacttaccgtgattgggagactattaatacggcgttagaaatccattacaacaacattctgccgggtaacggtaaatcgaaagcggacaaagtgaagaaggcggttaagaacgatcttcagaagtctatcacggagattaatgagctggtttccaattacaagttgtgctcggatgataacatcaaagctgaaacctatatccatgaaatttctcatattcttaataacttcgaggcacaagaattaaaatataacccagaaattcatctggttgagagcgaacttaaagcttcagaattaaaaaatgttttggacgtaattatgaacgcccgtcattggtgcaaagtgtttatgacagaggagttagtagataaggataacaacttttatgcagaattggaagagatctatgatgagatctatccagtgatttcactgtataacttagtccgtaattacgtcactcagaagccgtactcaactaaaaagatcaagttaaattttggaattccgacattggcggatggttggagtaagtctaaggaatactcaaataacgctattatcttaatgcgtgacaacctgtattacttgggtattttcaatgccaaaaataagcccgataaaaaaatcattgaagggaatacttcagaaaataagggagattacaaaaaaatgatttataaccttttgccaggcccaaacaaaatgatccccaaggtgtttttgagtagtaagacgggagtagaaacatataagccatcagcgtacattcttgaagggtacaaacaaaataaacacatcaagagcagcaaggactttgacattacattttgtcatgacttaatcgactactttaaaaattgcattgccattcaccctgagtggaaaaattttggtttcgacttcagtgatacctctacctatgaagatatctctggtttttatcgtgaggtagaacttcagggttacaagatcgattggacgtacatttccgagaaagacattgatcttttacaagagaagggtcagctttacttatttcagatctacaataaagacttttcgaaaaaatccacgggcaacgacaaccttcatacaatgtacttaaagaacctgttctctgaagaaaacttgaaagatatcgtgcttaaattgaatggcgaggccgagatttttttccgtaaaagctcgattaagaatcccatcatccacaagaaaggcagcattctggtaaatcgtacctatgaagcggaggaaaaggaccaatttggtaatattcagattgtccgtaagaacatccctgaaaatatctatcaagaattatataaatatttcaacgataagtcggacaaggaacttagcgatgaagccgcgaagttgaaaaatgttgttggtcaccacgaagcagcatttaacattgtgaaagactatcgctacacttacgataagtacctgttacatatgcctattacgattaactttaaggcaaataagacaggttttatcaacgaccgtatcctgcaatatattgcaaaagagaaggacctgcatgtcattgggattgatcgcggtgaacgcaatctgatttacgtgagtgttattgatacctgcggtaatattgttgagcaaaagtcttttaatatcgttaatggttacgactaccaaattaagcttaaacaacaggaaggtgcccgccagatcgcccgtaaggagtggaaggaaatcggaaaaattaaggaaatcaaagagggatatctgagcttggttattcatgaaatctcaaagatggttattaagtacaacgccatcatcgctatggaagacttatcgtatgggtttaaaaagggtcgtttcaaagttgagcgccaggtctaccaaaagtttgaaacgatgcttattaataaattaaactacttggttttcaaagatatctctattaccgagaatggaggtttactgaaaggataccagttaacgtatatccccgataagcttaaaaacgtgggccatcagtgtggctgtattttctatgtgcccgcggcatatacatcaaaaattgacccgacgacgggtttcgttaatatcttcaagttcaaagatctgacagttgatgcaaaacgcgaattcattaagaagttcgatagtattcgctatgactccgagaaaaatttgttttgcttcacttttgactacaataactttattactcagaatacagtcatgagtaaaagctcctggtcggtttacacgtacggggtacgcatcaaacgtcgttttgtgaatggtcgttttagtaatgagtcggatacaattgatattaccaaggatatggagaagactctggaaatgacagacatcaattggcgtgatggacatgatttgcgtcaggacattatcgactatgagattgtgcagcatattttcgaaatttttcgcctgacggtgcaaatgcgtaattccttaagcgaactggaagatcgcgactatgaccgcttaatttctcctgtgctgaatgagaacaacatcttctatgactcagcgaaagccggggacgctttgccaaaggatgcagatgctaacggtgcatattgtattgctctgaaaggcctttacgagatcaaacaaattactgaaaactggaaggaagatggaaagttttcccgtgataaattgaagatctctaataaggactggtttgactttatccaaaataaacgttattta

SEQ ID NO: 206 - protein, 1263 aa, synthetic construct
MNNGTNNFQNFIGISSLQKTLRNALIPTETTQQFIVKNGIIKEDELRGENRQILKDIMDDYYRGFISETLSSIDDIDWTSLFEKMEIQLKNGDNKDTLIKEQTEYRKAIHKKFANDDRFKNMFSAKLISDILPEFVIHNNNYSASEKEEKTQVIKLFSRFATSFKDYFKNRANCFSADDISSSSCHRIVNDNAEIFFSNALVYRRIVKSLSNDDINKISGDMKDSLKEMSLEEIYSYEKYGEFITQEGISFYNDICGKVNSFMNLYCQKNKENKNLYKLQKLHKQILCIADTSYEVPYKFESDEEVYQSVNGFLDNISSKHIVERLRKIGDNYNGYNLDKIYIVSKFYESVSQKTYRDWETINTALEIHYNNILPGNGKSKADKVKKAVKNDLQKSITEINELVSNYKLCSDDNIKAETYIHEISHILNNFEAQELKYNPEIHLVESELKASELKNVLDVIMNARHWCKVFMTEELVDKDNNFYAELEEIYDEIYPVISLYNLVRNYVTQKPYSTKKIKLNFGIPTLADGWSKSKEYSNNAIILMRDNLYYLGIFNAKNKPDKKIIEGNTSENKGDYKKMIYNLLPGPNKMIPKVFLSSKTGVETYKPSAYILEGYKQNKHIKSSKDFDITFCHDLIDYFKNCIAIHPEWKNFGFDFSDTSTYEDISGFYREVELQGYKIDWTYISEKDIDLLQEKGQLYLFQIYNKDFSKKSTGNDNLHTMYLKNLFSEENLKDIVLKLNGEAEIFFRKSSIKNPIIHKKGSILVNRTYEAEEKDQFGNIQIVRKNIPENIYQELYKYFNDKSDKELSDEAAKLKNVVGHHEAAFNIVKDYRYTYDKYLLHMPITINFKANKTGFINDRILQYIAKEKDLHVIGIDRGERNLIYVSVIDTCGNIVEQKSFNIVNGYDYQIKLKQQEGARQIARKEWKEIGKIKEIKEGYLSLVIHEISKMVIKYNAIIAMEDLSYGFKKGRFKVERQVYQKFETMLINKLNYLVFKDISITENGGLLKGYQLTYIPDKLKNVGHQCGCIFYVPAAYTSKIDPTTGFVNIFKFKDLTVDAKREFIKKFDSIRYDSEKNLFCFTFDYNNFITQNTVMSKSSWSVYTYGVRIKRRFVNGRFSNESDTIDITKDMEKTLEMTDINWRDGHDLRQDIIDYEIVQHIFEIFRLTVQMRNSLSELEDRDYDRLISPVLNENNIFYDSAKAGDALPKDADANGAYCIALKGLYEIKQITENWKEDGKFSRDKLKISNKDWFDFIQNKRYL

SEQ ID NO: 207 - DNA, 3789 bp, synthetic construct
  source 1..3789: mol_type = other DNA
atgaataacggtaccaataactttcaaaattttatcgggatctcctcgttgcaaaaaactcttcgtaatgctttaatcccgactgagacaacacagcagttcatcgttaaaaacggcatcattaaagaagatgagctgcgcggcgagaaccgtcagattttaaaggacatcatggacgactattaccgtgggttcatctcagaaacattaagcagcatcgatgatatcgactggacctcactgtttgagaagatggagattcaacttaagaatggagacaacaaagacactttaattaaggagcagacggaatatcgtaaagctatccataaaaaatttgcaaacgatgaccgtttcaaaaatatgttttccgcaaaattgattagcgacattttacctgaattcgtaatccataacaacaactattccgcatctgaaaaagaggagaagacccaagttatcaaacttttttcacgtttcgcgacatcttttaaagactactttaagaatcgtgcgaattgtttcagtgcagatgatatttcgtctagttcatgtcaccgtatcgtgaatgacaacgctgagattttcttttctaatgcgttggtgtatcgccgcatcgtaaagtccttgtcgaatgatgatatcaacaaaattagtggtgacatgaaagactccctgaaagaaatgtcattagaggagatttacagctacgaaaaatacggagagttcatcactcaggaaggtatctccttttacaacgatatttgcggcaaagttaatagtttcatgaatctgtattgtcagaagaataaggaaaacaagaatctgtacaagttacaaaagcttcataaacagatcttgtgcatcgccgacacgtcttatgaagtcccgtataaatttgaaagccgtgaagaagtatatcagagtgtgaatggattcttggacaatatctcatcaaaacacattgttgaacgtttgcgcaaaatcggcgacaactataacggatacaacttggataaaatttatatcgtatcaaaattttatgaatcagtatcccaaaagacttaccgtgattgggagactattaatacggcgttagaaatccattacaacaacattctgccgggtaacggtaaatcgaaagcggacaaagtgaagaaggcggttaagaacgatcttcagaagtctatcacggagattaatgagctggtttccaattacaagttgtgctcggatgataacatcaaagctgaaacctatatccatgaaatttctcatattcttaataacttcgaggcacaagaattaaaatataacccagaaattcatctggttgagagcgaacttaaagcttcagaattaaaaaatgttttggacgtaattatgaacgcccgtcattggtgcaaagtgtttatgacagaggagttagtagataaggataacaacttttatgcagaattggaagagatctatgatgagatctatccagtgatttcactgtataacttagtccgtaattacgtcactcagaagccgtactcaactaaaaagatcaagttaaattttggaattccgacattggcggatggttggagtaagtctaaggaatactcaaataacgctattatcttaatgcgtgacaacctgtattacttgggtattttcaatgccaaaaataagcccgataaaaaaatcattgaagggaatacttcagaaaataagggagattacaaaaaaatgatttataaccttttgccaggcccaaacaaaatgatccccaaggtgtttttgagtagtaagacgggagtagaaacatataagccatcagcgtacattcttgaagggtacaaacaaaataaacacatcaagagcagcaaggactttgacattacattttgtcatgacttaatcgactactttaaaaattgcattgccattcaccctgagtggaaaaattttggtttcgacttcagtgatacctctacctatgaagatatctctggtttttatcgtgaggtagaacttcagggttacaagatcgattggacgtacatttccgagaaagacattgatcttttacaagagaagggtcagctttacttatttcagatctacaataaagacttttcgaaaaaatccacgggcaacgacaaccttcatacaatgtacttaaagaacctgttctctgaagaaaacttgaaagatatcgtgcttaaattgaatggcgaggccgagatttttttccgtaaaagctcgattaagaatcccatcatccacaagaaaggcagcattctggtaaatcgtacctatgaagcggaggaaaaggaccaatttggtaatattcagattgtccgtaagaacatccctgaaaatatctatcaagaattatataaatatttcaacgataagtcggacaaggaacttagcgatgaagccgcgaagttgaaaaatgttgttggtcaccacgaagcagcatttaacattgtgaaagactatcgctacacttacgataagtacctgttacatatgcctattacgattaactttaaggcaaataagacaggttttatcaacgaccgtatcctgcaatatattgcaaaagagaaggacctgcatgtcattgggattgatcgcggtgaacgcaatctgatttacgtgagtgttattgatacctgcggtaatattgttgagcaaaagtcttttaatatcgttaatggttacgactaccaaattaagcttaaacaacaggaaggtgcccgccagatcgcccgtaaggagtggaaggaaatcggaaaaattaaggaaatcaaagagggatatctgagcttggttattcatgaaatctcaaagatggttattaagtacaacgccatcatcgctatggaagacttatcgtatgggtttaaaaagggtcgtttcaaagttgagcgccaggtctaccaaaagtttgaaacgatgcttattaataaattaaactacttggttttcaaagatatctctattaccgagaatggaggtttactgaaaggataccagttaacgtatatccccgataagcttaaaaacgtgggccatcagtgtggctgtattttctatgtgcccgcggcatatacatcaaaaattgacccgacgacgggtttcgttaatatcttcaagttcaaagatctgacagttgatgcaaaacgcgaattcattaagaagttcgatagtattcgctatgactccgagaaaaatttgttttgcttcacttttgactacaataactttattactcagaatacagtcatgagtaaaagctcctggtcggtttacacgtacggggtacgcatcaaacgtcgttttgtgaatggtcgttttagtaatgagtcggatacaattgatattaccaaggatatggagaagactctggaaatgacagacatcaattggcgtgatggacatgatttgcgtcaggacattatcgactatgagattgtgcagcatattttcgaaatttttcgcctgacggtgcaaatgcgtaattccttaagcgaactggaagatcgcgactatgaccgcttaatttctcctgtgctgaatgagaacaacatcttctatgactcagcgaaagccggggacgctttgccaaaggatgcagatgctaacggtgcatattgtattgctctgaaaggcctttacgagatcaaacaaattactgaaaactggaaggaagatggaaagttttcccgtgataaattgaagatctctaataaggactggtttgactttatccaaaataaacgttattta

SEQ ID NO: 208 - protein, 1263 aa, synthetic construct
MNNGTNNFQNFIGISSLQKTLRNALIPTETTQQFIVKNGIIKEDELRGENRQILKDIMDDYYRGFISETLSSIDDIDWTSLFEKMEIQLKNGDNKDTLIKEQTEYRKAIHKKFANDDRFKNMFSAKLISDILPEFVIHNNNYSASEKEEKTQVIKLFSRFATSFKDYFKNRANCFSADDISSSSCHRIVNDNAEIFFSNALVYRRIVKSLSNDDINKISGDMKDSLKEMSLEEIYSYEKYGEFITQEGISFYNDICGKVNSFMNLYCQKNKENKNLYKLQKLHKQILCIADTSYEVPYKFESREEVYQSVNGFLDNISSKHIVERLRKIGDNYNGYNLDKIYIVSKFYESVSQKTYRDWETINTALEIHYNNILPGNGKSKADKVKKAVKNDLQKSITEINELVSNYKLCSDDNIKAETYIHEISHILNNFEAQELKYNPEIHLVESELKASELKNVLDVIMNARHWCKVFMTEELVDKDNNFYAELEEIYDEIYPVISLYNLVRNYVTQKPYSTKKIKLNFGIPTLADGWSKSKEYSNNAIILMRDNLYYLGIFNAKNKPDKKIIEGNTSENKGDYKKMIYNLLPGPNKMIPKVFLSSKTGVETYKPSAYILEGYKQNKHIKSSKDFDITFCHDLIDYFKNCIAIHPEWKNFGFDFSDTSTYEDISGFYREVELQGYKIDWTYISEKDIDLLQEKGQLYLFQIYNKDFSKKSTGNDNLHTMYLKNLFSEENLKDIVLKLNGEAEIFFRKSSIKNPIIHKKGSILVNRTYEAEEKDQFGNIQIVRKNIPENIYQELYKYFNDKSDKELSDEAAKLKNVVGHHEAAFNIVKDYRYTYDKYLLHMPITINFKANKTGFINDRILQYIAKEKDLHVIGIDRGERNLIYVSVIDTCGNIVEQKSFNIVNGYDYQIKLKQQEGARQIARKEWKEIGKIKEIKEGYLSLVIHEISKMVIKYNAIIAMEDLSYGFKKGRFKVERQVYQKFETMLINKLNYLVFKDISITENGGLLKGYQLTYIPDKLKNVGHQCGCIFYVPAAYTSKIDPTTGFVNIFKFKDLTVDAKREFIKKFDSIRYDSEKNLFCFTFDYNNFITQNTVMSKSSWSVYTYGVRIKRRFVNGRFSNESDTIDITKDMEKTLEMTDINWRDGHDLRQDIIDYEIVQHIFEIFRLTVQMRNSLSELEDRDYDRLISPVLNENNIFYDSAKAGDALPKDADANGAYCIALKGLYEIKQITENWKEDGKFSRDKLKISNKDWFDFIQNKRYL

SEQ ID NO: 209 - DNA, 3789 bp, synthetic construct
  source 1..3789: mol_type = other DNA
atgaataacggcaccaacaacttccagaactttattggtattagcagcctgcagaaaaccctgcgtaatgcactgattccgaccgaaaccacacagcagtttattgtgaaaaacggcatcatcaaagaagatgaacttcgcggagaaaatcgccagattctgaaagatatcatggatgattattatcgcggttttatcagcgaaaccctgagcagcattgatgatattgattggaccagcctgttcgagaaaatggaaatccagctgaaaaatggcgataacaaagacaccctgattaaagaacagacggaatatcgtaaagccatccacaaaaagttcgccaatgatgaccgctttaaaaacatgttcagcgcaaaactgattagcgatattctgccggaatttgtgatccacaataataactatagcgccagcgagaaagaagagaaaacccaggttattaaactgtttagccgttttgcgaccagcttcaaagattacttcaaaaatcgtgccaactgcttcagcgcagatgatattagcagtagcagctgtcatcgtattgtgaatgataacgccgaaatctttttcagcaatgccctggtttatcgtcgcattgttaaaagcctgagcaacgacgacatcaacaaaatcagcggtgatatgaaagatagcctgaaagaaatgagcctggaagaaatctatagctacgaaaaatatggcgagttcattacccaagaaggcatcagcttttataacgatatttgcggcaaagtgaacagctttatgaatctgtattgccagaaaaacaaagagaacaaaaacctgtacaaactgcagaaactgcataagcagattctgtgtattgcagataccagctatgaagtgccgtataaattcgaaagtcgtgaagaagtgtaccagagcgttaatggttttctggataacatcagcagcaaacacattgttgaacgtctgcgtaaaattggcgacaactataatggctataacctggacaaaatctacatcgtgagcaaattctatgaaagcgtgagccagaaaacatatcgtgattgggaaacaattaataccgccttggagatccactacaataacattctgcctggtaatggtaaaagcaaagccgacaaagttaaaaaggccgtgaaaaatgatctgcagaaatccattaccgaaatcaacgaactggtcagcaactataaactgtgttccgatgataatatcaaggccgaaacctatattcacgaaatctcccatatcctgaacaactttgaagcacaagagctgaaatataacccggaaattcatctggttgaaagcgaactgaaagccagtgaactgaaaaacgttctggatgtgattatgaacgcctttcattggtgtaaagtttttatgaccgaagaactggtggataaggataacaacttttatgccgaactggaagaaatctacgatgaaatttatccggtgatcagcctgtataatctggtgcgtaattatgtgacccagaaaccgtatagcaccccgaagatcaaactgaactttggtattccgacactggcagatggttggagcaaaagtaaagaatatagcaacaacgccattatcctgatgcgcgataatctgtactatctgggtatctttaacgccaaaaacaaaccggacaagaaaatcattgaaggcaataccagcgaaaacaaaggcgactataagaaaatgatttataatctgctgcctggtccgaacaaaatgattccgaaagtttttctgagcagtaagaccggtgtggaaacatataaaccgagcgcatatattctggaaggctacaaacagaacaagcatatcaaaagcagcaaagactttgatatcaccttttgccatgatctgatcgactatttcaaaaactgcattgccattcatccggaatggaaaaatttcggctttgatttcagcgataccagcacctatgaagatattagcggtttttatcgtgaagtggaactgcagggctataaaatcgattggacctatattagcgagaaggatattgatctgctgcaagaaaaaggtcagctgtacctgtttcagatctacaacaaagacttcagcaagaaaagcaccggcaatgataatctgcataccatgtatctgaagaacctgtttagcgaagagaacctgaaagacattgtgctgaaactgaatggtgaagccgagattttctttcgcaaatccagcattaaaaacccgatcatccataaaaagggtagcattctggttaatcgtacgtatgaagccgaagagaaagatcagtttggcaacattcagattgtgcgtaaaaacatcccggaaaacatctatcaagagctgtacaaatactttaacgataaaagcgataaagaactgtccgatgaagcagcgaaactgaagaatgttgttggtcatcatgaagccgcatttaacattgtgaaagattatcgttacacctatgataaatacctgctgcacatgccgatcaccatcaactttaaagcaaataagacgggtttcatcaacgatcgcattctgcagtatatcgccaaagaaaaagacctgcatgtgattggtattgatcgtggtgaacgcaatctgatttatgtgagcgttattgatacctgcggcaatattgtggaacagaaaagctttaatatcgtgaacggctatgactaccagatcaagctgaaacagcaagaaggtgcacgtcagattgcacgtaaagaatggaaagaaatcggcaaaatcaaagaaattaaagaaggctatctgagcctggtgattcatgagattagcaaaatggtgatcaagtataacgccatcattgccatggaagatctgagttatggttttaagaaaggtcgctttaaggtggaacgtcaggtgtatcagaaatttgaaaccatgctgatcaacaaactgaattatctggtgttcaaggacatcagcattacggaaaatggtggtctgctgaaaggttatcagctgacgtatattccggataagcttaaaaatgtgggtcatcagtgtggctgcatcttttatgttccggcagcctataccagcaaaattgatccgaccaccggttttgtgaacatcttcaaattcaaagatctgaccgttgatgccaaacgcgaattcatcaaaaagtttgatagcatccgttacgactccgagaaaaaccttttctgctttaccttcgactacaacaactttattacccagaatacggtgatgagcaaaagcagctggtcagtttatacctatggtgtgcgtattaaacgtcgctttgtgaatggtcgttttagcaatgaaagcgacaccatcgatatcaccaaagatatggaaaagaccctggaaatgaccgatattaactggcgtgatggtcatgatctgcgtcaggatattatcgattatgaaatcgtgcagcacatctttgaaatctttcgtctgaccgtgcagatgcgtaatagcctgagcgagctggaagatcgcgattatgatcgtctgattagtccggttctgaacgaaaacaacatcttctatgatagcgcaaaagccggtgatgcactgccgaaagatgccgatgcaaatggtgcatattgtattgcactgaaaggcctgtatgaaatcaagcagattaccgagaattggaaagaggatggtaaattcagccgtgataaactgaaaattagcaacaaggattggttcgatttcattcagaacaaacgctacctg

SEQ ID NO: 210 - protein, 1263 aa, synthetic construct
MNNGTNNFQNFIGISSLQKTLRNALIPTETTQQFIVKNGIIKEDELRGENRQILKDIMDDYYRGFISETLSSIDDIDWTSLFEKMEIQLKNGDNKDTLIKEQTEYRKAIHKKFANDDRFKNMFSAKLISDILPEFVIHNNNYSASEKEEKTQVIKLFSRFATSFKDYFKNRANCFSADDISSSSCHRIVNDNAEIFFSNALVYRRIVKSLSNDDINKISGDMKDSLKEMSLEEIYSYEKYGEFITQEGISFYNDICGKVNSFMNLYCQKNKENKNLYKLQKLHKQILCIADTSYEVPYKFESREEVYQSVNGFLDNISSKHIVERLRKIGDNYNGYNLDKIYIVSKFYESVSQKTYRDWETINTALEIHYNNILPGNGKSKADKVKKAVKNDLQKSITEINELVSNYKLCSDDNIKAETYIHEISHILNNFEAQELKYNPEIHLVESELKASELKNVLDVIMNAFHWCKVFMTEELVDKDNNFYAELEEIYDEIYPVISLYNLVRNYVTQKPYSTPKIKLNFGIPTLADGWSKSKEYSNNAIILMRDNLYYLGIFNAKNKPDKKIIEGNTSENKGDYKKMIYNLLPGPNKMIPKVFLSSKTGVETYKPSAYILEGYKQNKHIKSSKDFDITFCHDLIDYFKNCIAIHPEWKNFGFDFSDTSTYEDISGFYREVELQGYKIDWTYISEKDIDLLQEKGQLYLFQIYNKDFSKKSTGNDNLHTMYLKNLFSEENLKDIVLKLNGEAEIFFRKSSIKNPIIHKKGSILVNRTYEAEEKDQFGNIQIVRKNIPENIYQELYKYFNDKSDKELSDEAAKLKNVVGHHEAAFNIVKDYRYTYDKYLLHMPITINFKANKTGFINDRILQYIAKEKDLHVIGIDRGERNLIYVSVIDTCGNIVEQKSFNIVNGYDYQIKLKQQEGARQIARKEWKEIGKIKEIKEGYLSLVIHEISKMVIKYNAIIAMEDLSYGFKKGRFKVERQVYQKFETMLINKLNYLVFKDISITENGGLLKGYQLTYIPDKLKNVGHQCGCIFYVPAAYTSKIDPTTGFVNIFKFKDLTVDAKREFIKKFDSIRYDSEKNLFCFTFDYNNFITQNTVMSKSSWSVYTYGVRIKRRFVNGRFSNESDTIDITKDMEKTLEMTDINWRDGHDLRQDIIDYEIVQHIFEIFRLTVQMRNSLSELEDRDYDRLISPVLNENNIFYDSAKAGDALPKDADANGAYCIALKGLYEIKQITENWKEDGKFSRDKLKISNKDWFDFIQNKRYL

SEQ ID NO: 211 - DNA, 51 bp, synthetic construct
  source 1..51: mol_type = other DNA
taagtataagaaggagatatacatnnkaataacggtaccaataactttcaa

SEQ ID NO: 212 - DNA, 51 bp, synthetic construct
  source 1..51: mol_type = other DNA
gtataagaaggagatatacatatgnnkaacggtaccaataactttcaaaat

SEQ ID NO: 213 - DNA, 51 bp, synthetic construct
  source 1..51: mol_type = other DNA
taagaaggagatatacatatgaatnnkggtaccaataactttcaaaatttt

SEQ ID NO: 214 - DNA, 51 bp, synthetic construct
  source 1..51: mol_type = other DNA
gaaggagatatacatatgaataacnnkaccaataactttcaaaattttatc

SEQ ID NO: 215 - DNA, 51 bp, synthetic construct
  source 1..51: mol_type = other DNA
ggagatatacatatgaataacggtnnkaataactttcaaaattttatcggg

SEQ ID NO: 216 - DNA, 51 bp, synthetic construct
  source 1..51: mol_type = other DNA
gatatacatatgaataacggtaccnnkaactttcaaaattttatcgggatc

SEQ ID NO: 217 - DNA, 51 bp, synthetic construct
  source 1..51: mol_type = other DNA
atacatatgaataacggtaccaatnnktttcaaaattttatcgggatctcc

SEQ ID NO: 218 - DNA, 51 bp, synthetic construct
  source 1..51: mol_type = other DNA
catatgaataacggtaccaataacnnkcaaaattttatcgggatctcctcg

SEQ ID NO: 219 - DNA, 51 bp, synthetic construct
  source 1..51: mol_type = other DNA
atgaataacggtaccaataactttnnkaattttatcgggatctcctcgttg

SEQ ID NO: 220 - DNA, 51 bp, synthetic construct
  source 1..51: mol_type = other DNA
aataacggtaccaataactttcaannktttatcgggatctcctcgttgcaa

SEQ ID NO: 221 - DNA, 51 bp, synthetic construct
  source 1..51: mol_type = other DNA
aacggtaccaataactttcaaaatnnkatcgggatctcctcgttgcaaaaa

SEQ ID NO: 222 - DNA, 51 bp, synthetic construct
  source 1..51: mol_type = other DNA
ggtaccaataactttcaaaattttnnkgggatctcctcgttgcaaaaaact

SEQ ID NO: 223 - DNA, 51 bp, synthetic construct
  source 1..51: mol_type = other DNA
accaataactttcaaaattttatcnnkatctcctcgttgcaaaaaactctt

SEQ ID NO: 224 - DNA, 51 bp, synthetic construct
  source 1..51: mol_type = other DNA
aataactttcaaaattttatcgggnnktcctcgttgcaaaaaactcttcgt

SEQ ID NO: 225 - DNA, 51 bp, synthetic construct
  source 1..51: mol_type = other DNA
aactttcaaaattttatcgggatcnnktcgttgcaaaaaactcttcgtaat

SEQ ID NO: 226 - DNA, 51 bp, synthetic construct
  source 1..51: mol_type = other DNA
tttcaaaattttatcgggatctccnnkttgcaaaaaactcttcgtaatgct

SEQ ID NO: 227 - DNA, 51 bp, synthetic construct
  source 1..51: mol_type = other DNA
caaaattttatcgggatctcctcgnnkcaaaaaactcttcgtaatgcttta

SEQ ID NO: 228 - DNA, 51 bp, synthetic construct
  source 1..51: mol_type = other DNA
aattttatcgggatctcctcgttgnnkaaaactcttcgtaatgctttaatc

SEQ ID NO: 229 - DNA, 51 bp, synthetic construct
  source 1..51: mol_type = other DNA
tttatcgggatctcctcgttgcaannkactcttcgtaatgctttaatcccg

SEQ ID NO: 230 - DNA, 51 bp, synthetic construct
  source 1..51: mol_type = other DNA
atcgggatctcctcgttgcaaaaannkcttcgtaatgctttaatcccgact

SEQ ID NO: 231 - DNA, 51 bp, synthetic construct
  source 1..51: mol_type = other DNA
gggatctcctcgttgcaaaaaactnnkcgtaatgctttaatcccgactgag

SEQ ID NO: 232 - DNA, 51 bp, synthetic construct
  source 1..51: mol_type = other DNA
atctcctcgttgcaaaaaactcttnnkaatgctttaatcccgactgagaca

SEQ ID NO: 233 - DNA, 51 bp, synthetic construct
  source 1..51: mol_type = other DNA
tcctcgttgcaaaaaactcttcgtnnkgctttaatcccgactgagacaaca

SEQ ID NO: 234 - DNA, 51 bp, synthetic construct
  source 1..51: mol_type = other DNA
tcgttgcaaaaaactcttcgtaatnnkttaatcccgactgagacaacacag

SEQ ID NO: 235 - DNA, 51 bp, synthetic construct
  source 1..51: mol_type = other DNA
ttgcaaaaaactcttcgtaatgctnnkatcccgactgagacaacacagcag

SEQ ID NO: 236 - DNA, 51 bp, synthetic construct
  source 1..51: mol_type = other DNA
caaaaaactcttcgtaatgctttannkccgactgagacaacacagcagttc

SEQ ID NO: 237 - DNA, 51 bp, synthetic construct
  source 1..51: mol_type = other DNA
aaaactcttcgtaatgctttaatcnnkactgagacaacacagcagttcatc

SEQ ID NO: 238 - DNA, 51 bp, synthetic construct
  source 1..51: mol_type = other DNA
actcttcgtaatgctttaatcccgnnkgagacaacacagcagttcatcgtt

SEQ ID NO: 239 - DNA, 51 bp, synthetic construct
  source 1..51: mol_type = other DNA
cttcgtaatgctttaatcccgactnnkacaacacagcagttcatcgttaaa

SEQ ID NO: 240 - DNA, 51 bp, synthetic construct
  source 1..51: mol_type = other DNA
cgtaatgctttaatcccgactgagnnkacacagcagttcatcgttaaaaac

SEQ ID NO: 241 - DNA, 51 bp, synthetic construct
  source 1..51: mol_type = other DNA
aatgctttaatcccgactgagacannkcagcagttcatcgttaaaaacggc

SEQ ID NO: 242 - DNA, 51 bp, synthetic construct
  source 1..51: mol_type = other DNA
gctttaatcccgactgagacaacannkcagttcatcgttaaaaacggcatc

SEQ ID NO: 243 - DNA, 51 bp, synthetic construct
  source 1..51: mol_type = other DNA
ttaatcccgactgagacaacacagnnkttcatcgttaaaaacggcatcatt

SEQ ID NO: 244 - DNA, 51 bp, synthetic construct
  source 1..51: mol_type = other DNA
atcccgactgagacaacacagcagnnkatcgttaaaaacggcatcattaaa

SEQ ID NO: 245 - DNA, 51 bp, synthetic construct
  source 1..51: mol_type = other DNA
ccgactgagacaacacagcagttcnnkgttaaaaacggcatcattaaagaa

SEQ ID NO: 246 - DNA, 51 bp, synthetic construct
  source 1..51: mol_type = other DNA
actgagacaacacagcagttcatcnnkaaaaacggcatcattaaagaagat

SEQ ID NO: 247 - DNA, 51 bp, synthetic construct
  source 1..51: mol_type = other DNA
gagacaacacagcagttcatcgttnnkaacggcatcattaaagaagatgag

SEQ ID NO: 248 - DNA, 51 bp, synthetic construct
  source 1..51: mol_type = other DNA
acaacacagcagttcatcgttaaannkggcatcattaaagaagatgagctg

SEQ ID NO: 249 - DNA, 51 bp, synthetic construct
  source 1..51: mol_type = other DNA
acacagcagttcatcgttaaaaacnnkatcattaaagaagatgagctgcgc

SEQ ID NO: 250 - DNA, 51 bp, synthetic construct
  source 1..51: mol_type = other DNA
cagcagttcatcgttaaaaacggcnnkattaaagaagatgagctgcgcggc

SEQ ID NO: 251 - DNA, 51 bp, synthetic construct
  source 1..51: mol_type = other DNA
cagttcatcgttaaaaacggcatcnnkaaagaagatgagctgcgcggcgag

SEQ ID NO: 252 - DNA, 51 bp, synthetic construct
  source 1..51: mol_type = other DNA
ttcatcgttaaaaacggcatcattnnkgaagatgagctgcgcggcgagaac

SEQ ID NO: 253 - DNA, 51 bp, synthetic construct
  source 1..51: mol_type = other DNA
atcgttaaaaacggcatcattaaannkgatgagctgcgcggcgagaaccgt

SEQ ID NO: 254 - DNA, 51 bp, synthetic construct
  source 1..51: mol_type = other DNA
gttaaaaacggcatcattaaagaannkgagctgcgcggcgagaaccgtcag

SEQ ID NO: 255 - DNA, 51 bp, synthetic construct
  source 1..51: mol_type = other DNA
aaaaacggcatcattaaagaagatnnkctgcgcggcgagaaccgtcagatt

SEQ ID NO: 256 - DNA, 51 bp, synthetic construct
  source 1..51: mol_type = other DNA
aacggcatcattaaagaagatgagnnkcgcggcgagaaccgtcagatttta

SEQ ID NO: 257 - DNA, 51 bp, synthetic construct
  source 1..51: mol_type = other DNA
ggcatcattaaagaagatgagctgnnkggcgagaaccgtcagattttaaag

SEQ ID NO: 258 - DNA, 51 bp, synthetic construct
  source 1..51: mol_type = other DNA
atcattaaagaagatgagctgcgcnnkgagaaccgtcagattttaaaggac

SEQ ID NO: 259 - DNA, 51 bp, synthetic construct
  source 1..51: mol_type = other DNA
attaaagaagatgagctgcgcggcnnkaaccgtcagattttaaaggacatc

SEQ ID NO: 260 - DNA, 51 bp, synthetic construct
  source 1..51: mol_type = other DNA
aaagaagatgagctgcgcggcgagnnkcgtcagattttaaaggacatcatg

SEQ ID NO: 261 - DNA, 51 bp, synthetic construct
  source 1..51: mol_type = other DNA
gaagatgagctgcgcggcgagaacnnkcagattttaaaggacatcatggac

SEQ ID NO: 262 - DNA, 51 bp, synthetic construct
  source 1..51: mol_type = other DNA
gatgagctgcgcggcgagaaccgtnnkattttaaaggacatcatggacgac

SEQ ID NO: 263 - DNA, 51 bp, synthetic construct
  source 1..51: mol_type = other DNA
gagctgcgcggcgagaaccgtcagnnkttaaaggacatcatggacgactat

SEQ ID NO: 264 - DNA, 51 bp, synthetic construct
  source 1..51: mol_type = other DNA
ctgcgcggcgagaaccgtcagattnnkaaggacatcatggacgactattac

SEQ ID NO: 265 - DNA, 51 bp, synthetic construct
  source 1..51: mol_type = other DNA
cgcggcgagaaccgtcagattttannkgacatcatggacgactattaccgt

SEQ ID NO: 266 - DNA, 51 bp, synthetic construct
  source 1..51: mol_type = other DNA
ggcgagaaccgtcagattttaaagnnkatcatggacgactattaccgtggg

SEQ ID NO: 267 - DNA, 51 bp, synthetic construct
  source 1..51: mol_type = other DNA
gagaaccgtcagattttaaaggacnnkatggacgactattaccgtgggttc

SEQ ID NO: 268 - DNA, 51 bp, synthetic construct
  source 1..51: mol_type = other DNA
aaccgtcagattttaaaggacatcnnkgacgactattaccgtgggttcatc

SEQ ID NO: 269 - DNA, 51 bp, synthetic construct
  source 1..51: mol_type = other DNA
cgtcagattttaaaggacatcatgnnkgactattaccgtgggttcatctca

SEQ ID NO: 270 - DNA, 51 bp, synthetic construct
  source 1..51: mol_type = other DNA
cagattttaaaggacatcatggacnnktattaccgtgggttcatctcagaa

SEQ ID NO: 271 - DNA, 51 bp, synthetic construct
  source 1..51: mol_type = other DNA
attttaaaggacatcatggacgacnnktaccgtgggttcatctcagaaaca

SEQ ID NO: 272 - DNA, 51 bp, synthetic construct
  source 1..51: mol_type = other DNA
ttaaaggacatcatggacgactatnnkcgtgggttcatctcagaaacatta

SEQ ID NO: 273 - DNA, 51 bp, synthetic construct
  source 1..51: mol_type = other DNA
aaggacatcatggacgactattacnnkgggttcatctcagaaacattaagc

SEQ ID NO: 274 - DNA, 51 bp, synthetic construct
  source 1..51: mol_type = other DNA
gacatcatggacgactattaccgtnnkttcatctcagaaacattaagcagc

SEQ ID NO: 275 - DNA, 51 bp, synthetic construct
  source 1..51: mol_type = other DNA
atcatggacgactattaccgtgggnnkatctcagaaacattaagcagcatc

SEQ ID NO: 276 - DNA, 51 bp, synthetic construct
  source 1..51: mol_type = other DNA
atggacgactattaccgtgggttcnnktcagaaacattaagcagcatcgat

SEQ ID NO: 277 - DNA, 51 bp, synthetic construct
  source 1..51: mol_type = other DNA
gacgactattaccgtgggttcatcnnkgaaacattaagcagcatcgatgat

SEQ ID NO: 278 - DNA, 51 bp, synthetic construct
  source 1..51: mol_type = other DNA
gactattaccgtgggttcatctcannkacattaagcagcatcgatgatatc

SEQ ID NO: 279 - DNA, 51 bp, synthetic construct
  source 1..51: mol_type = other DNA
tattaccgtgggttcatctcagaannkttaagcagcatcgatgatatcgac

SEQ ID NO: 280 - DNA, 51 bp, synthetic construct
  source 1..51: mol_type = other DNA
taccgtgggttcatctcagaaacannkagcagcatcgatgatatcgactgg

SEQ ID NO: 281 - DNA, 51 bp, synthetic construct
  source 1..51: mol_type = other DNA
cgtgggttcatctcagaaacattannkagcatcgatgatatcgactggacc

SEQ ID NO: 282 - DNA, 51 bp, synthetic construct
  source 1..51: mol_type = other DNA
gggttcatctcagaaacattaagcnnkatcgatgatatcgactggacctca

SEQ ID NO: 283 - DNA, 51 bp, synthetic construct
  source 1..51: mol_type = other DNA
ttcatctcagaaacattaagcagcnnkgatgatatcgactggacctcactg

SEQ ID NO: 284 - DNA, 51 bp, synthetic construct
  source 1..51: mol_type = other DNA
atctcagaaacattaagcagcatcnnkgatatcgactggacctcactgttt

SEQ ID NO: 285 - DNA, 51 bp, synthetic construct
  source 1..51: mol_type = other DNA
tcagaaacattaagcagcatcgatnnkatcgactggacctcactgtttgag

SEQ ID NO: 286 - DNA, 51 bp, synthetic construct
  source 1..51: mol_type = other DNA
gaaacattaagcagcatcgatgatnnkgactggacctcactgtttgagaag

SEQ ID NO: 287 - DNA, 51 bp, synthetic construct
  source 1..51: mol_type = other DNA
acattaagcagcatcgatgatatcnnktggacctcactgtttgagaagatg

SEQ ID NO: 288 - DNA, 51 bp, synthetic construct
  source 1..51: mol_type = other DNA
ttaagcagcatcgatgatatcgacnnkacctcactgtttgagaagatggag

SEQ ID NO: 289 - DNA, 51 bp, synthetic construct
  source 1..51: mol_type = other DNA
agcagcatcgatgatatcgactggnnktcactgtttgagaagatggagatt

SEQ ID NO: 290 - DNA, 51 bp, synthetic construct
  source 1..51: mol_type = other DNA
agcatcgatgatatcgactggaccnnkctgtttgagaagatggagattcaa

SEQ ID NO: 291 - DNA, 51 bp, synthetic construct
  source 1..51: mol_type = other DNA
atcgatgatatcgactggacctcannktttgagaagatggagattcaactt

SEQ ID NO: 292 - DNA, 51 bp, synthetic construct
  source 1..51: mol_type = other DNA
gatgatatcgactggacctcactgnnkgagaagatggagattcaacttaag

SEQ ID NO: 293 - DNA, 51 bp, synthetic construct
  source 1..51: mol_type = other DNA
gatatcgactggacctcactgtttnnkaagatggagattcaacttaagaat

SEQ ID NO: 294 - DNA, 51 bp, synthetic construct
  source 1..51: mol_type = other DNA
atcgactggacctcactgtttgagnnkatggagattcaacttaagaatgga

SEQ ID NO: 295 - DNA, 51 bp, synthetic construct
  source 1..51: mol_type = other DNA
gactggacctcactgtttgagaagnnkgagattcaacttaagaatggagac

SEQ ID NO: 296 - DNA, 51 bp, synthetic construct
  source 1..51: mol_type = other DNA
tggacctcactgtttgagaagatgnnkattcaacttaagaatggagacaac

SEQ ID NO: 297 - DNA, 51 bp, synthetic construct
  source 1..51: mol_type = other DNA
acctcactgtttgagaagatggagnnkcaacttaagaatggagacaacaaa

SEQ ID NO: 298 - DNA, 51 bp, synthetic construct
  source 1..51: mol_type = other DNA
tcactgtttgagaagatggagattnnkcttaagaatggagacaacaaagac

SEQ ID NO: 299 - DNA, 51 bp, synthetic construct
  source 1..51: mol_type = other DNA
ctgtttgagaagatggagattcaannkaagaatggagacaacaaagacact

SEQ ID NO: 300 - DNA, 51 bp, synthetic construct
  source 1..51: mol_type = other DNA
tttgagaagatggagattcaacttnnkaatggagacaacaaagacacttta

SEQ ID NO: 301 - DNA, 51 bp, synthetic construct
  source 1..51: mol_type = other DNA
gagaagatggagattcaacttaagnnkggagacaacaaagacactttaatt

SEQ ID NO: 302 - DNA, 51 bp, synthetic construct
  source 1..51: mol_type = other DNA
aagatggagattcaacttaagaatnnkgacaacaaagacactttaattaag

SEQ ID NO: 303 - DNA, 51 bp, synthetic construct
  source 1..51: mol_type = other DNA
atggagattcaacttaagaatggannkaacaaagacactttaattaaggag

SEQ ID NO: 304 - DNA, 51 bp, synthetic construct
  source 1..51: mol_type = other DNA
gagattcaacttaagaatggagacnnkaaagacactttaattaaggagcag

SEQ ID NO: 305 - DNA, 51 bp, synthetic construct
  source 1..51: mol_type = other DNA
attcaacttaagaatggagacaacnnkgacactttaattaaggagcagacg

SEQ ID NO: 306 - DNA, 51 bp, synthetic construct
  source 1..51: mol_type = other DNA
caacttaagaatggagacaacaaannkactttaattaaggagcagacggaa

SEQ ID NO: 307 - DNA, 51 bp, synthetic construct
  source 1..51: mol_type = other DNA
cttaagaatggagacaacaaagacnnkttaattaaggagcagacggaatat

SEQ ID NO: 308 - DNA, 51 bp, synthetic construct
  source 1..51: mol_type = other DNA
aagaatggagacaacaaagacactnnkattaaggagcagacggaatatcgt

SEQ ID NO: 309 - DNA, 51 bp, synthetic construct
  source 1..51: mol_type = other DNA
aatggagacaacaaagacactttannkaaggagcagacggaatatcgtaaa

SEQ ID NO: 310 - DNA, 51 bp, synthetic construct
  source 1..51: mol_type = other DNA
ggagacaacaaagacactttaattnnkgagcagacggaatatcgtaaagct

SEQ ID NO: 311 - DNA, 51 bp, synthetic construct
  source 1..51: mol_type = other DNA
gacaacaaagacactttaattaagnnkcagacggaatatcgtaaagctatc

SEQ ID NO: 312 - DNA, 51 bp, synthetic construct
  source 1..51: mol_type = other DNA
aacaaagacactttaattaaggagnnkacggaatatcgtaaagctatccat

SEQ ID NO: 313 - DNA, 51 bp, synthetic construct
  source 1..51: mol_type = other DNA
aaagacactttaattaaggagcagnnkgaatatcgtaaagctatccataaa

SEQ ID NO: 314 - DNA, 51 bp, synthetic construct
  source 1..51: mol_type = other DNA
gacactttaattaaggagcagacgnnktatcgtaaagctatccataaaaaa

SEQ ID NO: 315 - DNA, 51 bp, synthetic construct
  source 1..51: mol_type = other DNA
actttaattaaggagcagacggaannkcgtaaagctatccataaaaaattt

SEQ ID NO: 316 - DNA, 51 bp, synthetic construct
  source 1..51: mol_type = other DNA
ttaattaaggagcagacggaatatnnkaaagctatccataaaaaatttgca

SEQ ID NO: 317 - DNA, 51 bp, synthetic construct
  source 1..51: mol_type = other DNA
attaaggagcagacggaatatcgtnnkgctatccataaaaaatttgcaaac

SEQ ID NO: 318 - DNA, 51 bp, synthetic construct
  source 1..51: mol_type = other DNA
aaggagcagacggaatatcgtaaannkatccataaaaaatttgcaaacgat

SEQ ID NO: 319 - DNA, 51 bp, synthetic construct
  source 1..51: mol_type = other DNA
gagcagacggaatatcgtaaagctnnkcataaaaaatttgcaaacgatgac

SEQ ID NO: 320 - DNA, 51 bp, synthetic construct
  source 1..51: mol_type = other DNA
cagacggaatatcgtaaagctatcnnkaaaaaatttgcaaacgatgaccgt

SEQ ID NO: 321 - DNA, 51 bp, synthetic construct
  source 1..51: mol_type = other DNA
acggaatatcgtaaagctatccatnnkaaatttgcaaacgatgaccgtttc

SEQ ID NO: 322 - DNA, 51 bp, synthetic construct
  source 1..51: mol_type = other DNA
gaatatcgtaaagctatccataaannktttgcaaacgatgaccgtttcaaa

SEQ ID NO: 323 - DNA, 51 bp, synthetic construct
  source 1..51: mol_type = other DNA
tatcgtaaagctatccataaaaaannkgcaaacgatgaccgtttcaaaaat

SEQ ID NO: 324 - DNA, 51 bp, synthetic construct
  source 1..51: mol_type = other DNA
cgtaaagctatccataaaaaatttnnkaacgatgaccgtttcaaaaatatg

SEQ ID NO: 325 - DNA, 51 bp, synthetic construct
  source 1..51: mol_type = other DNA
aaagctatccataaaaaatttgcannkgatgaccgtttcaaaaatatgttt

SEQ ID NO: 326 - DNA, 51 bp, synthetic construct
  source 1..51: mol_type = other DNA
gctatccataaaaaatttgcaaacnnkgaccgtttcaaaaatatgttttcc

SEQ ID NO: 327 - DNA, 51 bp, synthetic construct
  source 1..51: mol_type = other DNA
atccataaaaaatttgcaaacgatnnkcgtttcaaaaatatgttttccgca

SEQ ID NO: 328 - DNA, 51 bp, synthetic construct
  source 1..51: mol_type = other DNA
cataaaaaatttgcaaacgatgacnnkttcaaaaatatgttttccgcaaaa

SEQ ID NO: 329 - DNA, 51 bp, synthetic construct
  source 1..51: mol_type = other DNA
aaaaaatttgcaaacgatgaccgtnnkaaaaatatgttttccgcaaaattg

SEQ ID NO: 330 - DNA, 51 bp, synthetic construct
  source 1..51: mol_type = other DNA
aaatttgcaaacgatgaccgtttcnnkaatatgttttccgcaaaattgatt

SEQ ID NO: 331 - DNA, 51 bp, synthetic construct
  source 1..51: mol_type = other DNA
tttgcaaacgatgaccgtttcaaannkatgttttccgcaaaattgattagc

SEQ ID NO: 332 - DNA, 51 bp, synthetic construct
  source 1..51: mol_type = other DNA
gcaaacgatgaccgtttcaaaaatnnkttttccgcaaaattgattagcgac

SEQ ID NO: 333 - DNA, 51 bp, synthetic construct
  source 1..51: mol_type = other DNA
aacgatgaccgtttcaaaaatatgnnktccgcaaaattgattagcgacatt

SEQ ID NO: 334 - DNA, 51 bp, synthetic construct
  source 1..51: mol_type = other DNA
gatgaccgtttcaaaaatatgtttnnkgcaaaattgattagcgacatttta

SEQ ID NO: 335 - DNA, 51 bp, synthetic construct
  source 1..51: mol_type = other DNA
gaccgtttcaaaaatatgttttccnnkaaattgattagcgacattttacct

SEQ ID NO: 336 - DNA, 51 bp, synthetic construct
  source 1..51: mol_type = other DNA
cgtttcaaaaatatgttttccgcannkttgattagcgacattttacctgaa

SEQ ID NO: 337 - DNA, 51 bp, synthetic construct
  source 1..51: mol_type = other DNA
ttcaaaaatatgttttccgcaaaannkattagcgacattttacctgaattc

SEQ ID NO: 338 - DNA, 51 bp, synthetic construct
  source 1..51: mol_type = other DNA
aaaaatatgttttccgcaaaattgnnkagcgacattttacctgaattcgta

SEQ ID NO: 339 - DNA, 51 bp, synthetic construct
  source 1..51: mol_type = other DNA
aatatgttttccgcaaaattgattnnkgacattttacctgaattcgtaatc

SEQ ID NO: 340 - DNA, 51 bp, synthetic construct
  source 1..51: mol_type = other DNA
atgttttccgcaaaattgattagcnnkattttacctgaattcgtaatccat

SEQ ID NO: 341 - DNA, 51 bp, synthetic construct
  source 1..51: mol_type = other DNA
ttttccgcaaaattgattagcgacnnkttacctgaattcgtaatccataac

SEQ ID NO: 342 - DNA, 51 bp, synthetic construct
  source 1..51: mol_type = other DNA
tccgcaaaattgattagcgacattnnkcctgaattcgtaatccataacaac

SEQ ID NO: 343 - DNA, 51 bp, synthetic construct
  source 1..51: mol_type = other DNA
gcaaaattgattagcgacattttannkgaattcgtaatccataacaacaac

SEQ ID NO: 344 - DNA, 51 bp, synthetic construct
  source 1..51: mol_type = other DNA
aaattgattagcgacattttacctnnkttcgtaatccataacaacaactat

SEQ ID NO: 345 - DNA, 51 bp, synthetic construct
  source 1..51: mol_type = other DNA
ttgattagcgacattttacctgaannkgtaatccataacaacaactattcc

SEQ ID NO: 346 - DNA, 51 bp, synthetic construct
  source 1..51: mol_type = other DNA
attagcgacattttacctgaattcnnkatccataacaacaactattccgca

SEQ ID NO: 347 - DNA, 51 bp, synthetic construct
  source 1..51: mol_type = other DNA
agcgacattttacctgaattcgtannkcataacaacaactattccgcatct

SEQ ID NO: 348 - DNA, 51 bp, synthetic construct
  source 1..51: mol_type = other DNA
gacattttacctgaattcgtaatcnnkaacaacaactattccgcatctgaa

SEQ ID NO: 349 - DNA, 51 bp, synthetic construct
  source 1..51: mol_type = other DNA
attttacctgaattcgtaatccatnnkaacaactattccgcatctgaaaaa

SEQ ID NO: 350 - DNA, 51 bp, synthetic construct
  source 1..51: mol_type = other DNA
ttacctgaattcgtaatccataacnnkaactattccgcatctgaaaaagag

SEQ ID NO: 351 - DNA, 51 bp, synthetic construct
  source 1..51: mol_type = other DNA
cctgaattcgtaatccataacaacnnktattccgcatctgaaaaagaggag

SEQ ID NO: 352 - DNA, 51 bp, synthetic construct
  source 1..51: mol_type = other DNA
gaattcgtaatccataacaacaacnnktccgcatctgaaaaagaggagaag

SEQ ID NO: 353 - DNA, 51 bp, synthetic construct
  source 1..51: mol_type = other DNA
ttcgtaatccataacaacaactatnnkgcatctgaaaaagaggagaagacc

SEQ ID NO: 354 - DNA, 51 bp, synthetic construct
  source 1..51: mol_type = other DNA
gtaatccataacaacaactattccnnktctgaaaaagaggagaagacccaa

SEQ ID NO: 355 - DNA, 51 bp, synthetic construct
  source 1..51: mol_type = other DNA
atccataacaacaactattccgcannkgaaaaagaggagaagacccaagtt

SEQ ID NO: 356 - DNA, 51 bp, synthetic construct
  source 1..51: mol_type = other DNA
cataacaacaactattccgcatctnnkaaagaggagaagacccaagttatc

SEQ ID NO: 357 - DNA, 51 bp, synthetic construct
  source 1..51: mol_type = other DNA
aacaacaactattccgcatctgaannkgaggagaagacccaagttatcaaa

SEQ ID NO: 358 - DNA, 51 bp, synthetic construct
  source 1..51: mol_type = other DNA
aacaactattccgcatctgaaaaannkgagaagacccaagttatcaaactt

SEQ ID NO: 359 - DNA, 51 bp, synthetic construct
  source 1..51: mol_type = other DNA
aactattccgcatctgaaaaagagnnkaagacccaagttatcaaacttttt

SEQ ID NO: 360 - DNA, 51 bp, synthetic construct
  source 1..51: mol_type = other DNA
tattccgcatctgaaaaagaggagnnkacccaagttatcaaacttttttca

SEQ ID NO: 361 - DNA, 51 bp, synthetic construct
  source 1..51: mol_type = other DNA
tccgcatctgaaaaagaggagaagnnkcaagttatcaaacttttttcacgt

SEQ ID NO: 362 - DNA, 51 bp, synthetic construct
  source 1..51: mol_type = other DNA
gcatctgaaaaagaggagaagaccnnkgttatcaaacttttttcacgtttc

SEQ ID NO: 363 - DNA, 51 bp, synthetic construct
  source 1..51: mol_type = other DNA
tctgaaaaagaggagaagacccaannkatcaaacttttttcacgtttcgcg

SEQ ID NO: 364 - DNA, 51 bp, synthetic construct
  source 1..51: mol_type = other DNA
gaaaaagaggagaagacccaagttnnkaaacttttttcacgtttcgcgaca

SEQ ID NO: 365 - DNA, 51 bp, synthetic construct
  source 1..51: mol_type = other DNA
aaagaggagaagacccaagttatcnnkcttttttcacgtttcgcgacatct

SEQ ID NO: 366 - DNA, 51 bp, synthetic construct
  source 1..51: mol_type = other DNA
gaggagaagacccaagttatcaaannkttttcacgtttcgcgacatctttt

SEQ ID NO: 367 - DNA, 51 bp, synthetic construct
  source 1..51: mol_type = other DNA
gagaagacccaagttatcaaacttnnktcacgtttcgcgacatcttttaaa

SEQ ID NO: 368 - DNA, 51 bp, synthetic construct
  source 1..51: mol_type = other DNA
aagacccaagttatcaaactttttnnkcgtttcgcgacatcttttaaagac

SEQ ID NO: 369 - DNA, 51 bp, synthetic construct
  source 1..51: mol_type = other DNA
acccaagttatcaaacttttttcannkttcgcgacatcttttaaagactac

SEQ ID NO: 370 - DNA, 51 bp, synthetic construct
  source 1..51: mol_type = other DNA
caagttatcaaacttttttcacgtnnkgcgacatcttttaaagactacttt

SEQ ID NO: 371 - DNA, 51 bp, synthetic construct
  source 1..51: mol_type = other DNA
gttatcaaacttttttcacgtttcnnkacatcttttaaagactactttaag

SEQ ID NO: 372 - DNA, 51 bp, synthetic construct
  source 1..51: mol_type = other DNA
atcaaacttttttcacgtttcgcgnnktcttttaaagactactttaagaat

SEQ ID NO: 373 - DNA, 51 bp, synthetic construct
  source 1..51: mol_type = other DNA
aaacttttttcacgtttcgcgacannktttaaagactactttaagaatcgt

SEQ ID NO: 374 - DNA, 51 bp, synthetic construct
  source 1..51: mol_type = other DNA
cttttttcacgtttcgcgacatctnnkaaagactactttaagaatcgtgcg

SEQ ID NO: 375 - DNA, 51 bp, synthetic construct
  source 1..51: mol_type = other DNA
ttttcacgtttcgcgacatcttttnnkgactactttaagaatcgtgcgaat

SEQ ID NO: 376 - DNA, 51 bp, synthetic construct
  source 1..51: mol_type = other DNA
tcacgtttcgcgacatcttttaaannktactttaagaatcgtgcgaattgt

SEQ ID NO: 377 - DNA, 51 bp, synthetic construct
  source 1..51: mol_type = other DNA
cgtttcgcgacatcttttaaagacnnktttaagaatcgtgcgaattgtttc

SEQ ID NO: 378 - DNA, 51 bp, synthetic construct
  source 1..51: mol_type = other DNA
ttcgcgacatcttttaaagactacnnkaagaatcgtgcgaattgtttcagt

SEQ ID NO: 379 - DNA, 51 bp, synthetic construct
  source 1..51: mol_type = other DNA
gcgacatcttttaaagactactttnnkaatcgtgcgaattgtttcagtgca

SEQ ID NO: 380 - DNA, 51 bp, synthetic construct
  source 1..51: mol_type = other DNA
acatcttttaaagactactttaagnnkcgtgcgaattgtttcagtgcagat

SEQ ID NO: 381 - DNA, 51 bp, synthetic construct
  source 1..51: mol_type = other DNA
tcttttaaagactactttaagaatnnkgcgaattgtttcagtgcagatgat

SEQ ID NO: 382 - DNA, 51 bp, synthetic construct
  source 1..51: mol_type = other DNA
tttaaagactactttaagaatcgtnnkaattgtttcagtgcagatgatatt

SEQ ID NO: 383 - DNA, 51 bp, synthetic construct
  source 1..51: mol_type = other DNA
aaagactactttaagaatcgtgcgnnktgtttcagtgcagatgatatttcg

SEQ ID NO: 384 - DNA, 51 bp, synthetic construct
  source 1..51: mol_type = other DNA
gactactttaagaatcgtgcgaatnnkttcagtgcagatgatatttcgtct

SEQ ID NO: 385 - DNA, 51 bp, synthetic construct
  source 1..51: mol_type = other DNA
tactttaagaatcgtgcgaattgtnnkagtgcagatgatatttcgtctagt

SEQ ID NO: 386 - DNA, 51 bp, synthetic construct
  source 1..51: mol_type = other DNA
tttaagaatcgtgcgaattgtttcnnkgcagatgatatttcgtctagttca

SEQ ID NO: 387 - DNA, 51 bp, synthetic construct
  source 1..51: mol_type = other DNA
aagaatcgtgcgaattgtttcagtnnkgatgatatttcgtctagttcatgt

SEQ ID NO: 388 - DNA, 51 bp, synthetic construct
  source 1..51: mol_type = other DNA
aatcgtgcgaattgtttcagtgcannkgatatttcgtctagttcatgtcac

SEQ ID NO: 389 - DNA, 51 bp, synthetic construct
  source 1..51: mol_type = other DNA
cgtgcgaattgtttcagtgcagatnnkatttcgtctagttcatgtcaccgt

SEQ ID NO: 390 - DNA, 51 bp, synthetic construct
  source 1..51: mol_type = other DNA
gcgaattgtttcagtgcagatgatnnktcgtctagttcatgtcaccgtatc

SEQ ID NO: 391 - DNA, 51 bp, synthetic construct
  source 1..51: mol_type = other DNA
aattgtttcagtgcagatgatattnnktctagttcatgtcaccgtatcgtg

SEQ ID NO: 392 - DNA, 51 bp, synthetic construct
  source 1..51: mol_type = other DNA
tgtttcagtgcagatgatatttcgnnkagttcatgtcaccgtatcgtgaat

SEQ ID NO: 393 - DNA, 51 bp, synthetic construct
  source 1..51: mol_type = other DNA
ttcagtgcagatgatatttcgtctnnktcatgtcaccgtatcgtgaatgac

SEQ ID NO: 394 - DNA, 51 bp, synthetic construct
  source 1..51: mol_type = other DNA
agtgcagatgatatttcgtctagtnnktgtcaccgtatcgtgaatgacaac

SEQ ID NO: 395 - DNA, 51 bp, synthetic construct
  source 1..51: mol_type = other DNA
gcagatgatatttcgtctagttcannkcaccgtatcgtgaatgacaacgct

SEQ ID NO: 396 - DNA, 51 bp, synthetic construct
  source 1..51: mol_type = other DNA
gatgatatttcgtctagttcatgtnnkcgtatcgtgaatgacaacgctgag

SEQ ID NO: 397 - DNA, 51 bp, synthetic construct
  source 1..51: mol_type = other DNA
gatatttcgtctagttcatgtcacnnkatcgtgaatgacaacgctgagatt

SEQ ID NO: 398 - DNA, 51 bp, synthetic construct
  source 1..51: mol_type = other DNA
atttcgtctagttcatgtcaccgtnnkgtgaatgacaacgctgagattttc

SEQ ID NO: 399 - DNA, 51 bp, synthetic construct
  source 1..51: mol_type = other DNA
tcgtctagttcatgtcaccgtatcnnkaatgacaacgctgagattttcttt

SEQ ID NO: 400 - DNA, 51 bp, synthetic construct
  source 1..51: mol_type = other DNA
tctagttcatgtcaccgtatcgtgnnkgacaacgctgagattttcttttct

SEQ ID NO: 401 - DNA, 51 bp, synthetic construct
  source 1..51: mol_type = other DNA
agttcatgtcaccgtatcgtgaatnnkaacgctgagattttcttttctaat

SEQ ID NO: 402 - DNA, 51 bp, synthetic construct
  source 1..51: mol_type = other DNA
tcatgtcaccgtatcgtgaatgacnnkgctgagattttcttttctaatgcg

SEQ ID NO: 403 - DNA, 51 bp, synthetic construct
  source 1..51: mol_type = other DNA
tgtcaccgtatcgtgaatgacaacnnkgagattttcttttctaatgcgttg

SEQ ID NO: 404 - DNA, 51 bp, synthetic construct
  source 1..51: mol_type = other DNA
caccgtatcgtgaatgacaacgctnnkattttcttttctaatgcgttggtg

SEQ ID NO: 405 - DNA, 51 bp, synthetic construct
  source 1..51: mol_type = other DNA
cgtatcgtgaatgacaacgctgagnnkttcttttctaatgcgttggtgtat

SEQ ID NO: 406 - DNA, 51 bp, synthetic construct
  source 1..51: mol_type = other DNA
atcgtgaatgacaacgctgagattnnkttttctaatgcgttggtgtatcgc

SEQ ID NO: 407 - DNA, 51 bp, synthetic construct
  source 1..51: mol_type = other DNA
gtgaatgacaacgctgagattttcnnktctaatgcgttggtgtatcgccgc

SEQ ID NO: 408 - DNA, 51 bp, synthetic construct
  source 1..51: mol_type = other DNA
aatgacaacgctgagattttctttnnkaatgcgttggtgtatcgccgcatc

SEQ ID NO: 409 - DNA, 51 bp, synthetic construct
  source 1..51: mol_type = other DNA
gacaacgctgagattttcttttctnnkgcgttggtgtatcgccgcatcgta

SEQ ID NO: 410 - DNA, 51 bp, synthetic construct
  source 1..51: mol_type = other DNA
aacgctgagattttcttttctaatnnkttggtgtatcgccgcatcgtaaag

SEQ ID NO: 411 - DNA, 51 bp, synthetic construct
  source 1..51: mol_type = other DNA
gctgagattttcttttctaatgcgnnkgtgtatcgccgcatcgtaaagtcc

SEQ ID NO: 412 - DNA, 51 bp, synthetic construct
  source 1..51: mol_type = other DNA
gagattttcttttctaatgcgttgnnktatcgccgcatcgtaaagtccttg

SEQ ID NO: 413 - DNA, 51 bp, synthetic construct
  source 1..51: mol_type = other DNA
attttcttttctaatgcgttggtgnnkcgccgcatcgtaaagtccttgtcg

SEQ ID NO: 414 - DNA, 51 bp, synthetic construct
  source 1..51: mol_type = other DNA
ttcttttctaatgcgttggtgtatnnkcgcatcgtaaagtccttgtcgaat

SEQ ID NO: 415 - DNA, 51 bp, synthetic construct
  source 1..51: mol_type = other DNA
ttttctaatgcgttggtgtatcgcnnkatcgtaaagtccttgtcgaatgat

SEQ ID NO: 416 - DNA, 51 bp, synthetic construct
  source 1..51: mol_type = other DNA
tctaatgcgttggtgtatcgccgcnnkgtaaagtccttgtcgaatgatgat

SEQ ID NO: 417 - DNA, 51 bp, synthetic construct
  source 1..51: mol_type = other DNA
aatgcgttggtgtatcgccgcatcnnkaagtccttgtcgaatgatgatatc

SEQ ID NO: 418 - DNA, 51 bp, synthetic construct
  source 1..51: mol_type = other DNA
gcgttggtgtatcgccgcatcgtannktccttgtcgaatgatgatatcaac

SEQ ID NO: 419 - DNA, 51 bp, synthetic construct
  source 1..51: mol_type = other DNA
ttggtgtatcgccgcatcgtaaagnnkttgtcgaatgatgatatcaacaaa

SEQ ID NO: 420 - DNA, 51 bp, synthetic construct
  source 1..51: mol_type = other DNA
gtgtatcgccgcatcgtaaagtccnnktcgaatgatgatatcaacaaaatt

SEQ ID NO: 421 - DNA, 51 bp, synthetic construct
  source 1..51: mol_type = other DNA
tatcgccgcatcgtaaagtccttgnnkaatgatgatatcaacaaaattagt

SEQ ID NO: 422 - DNA, 51 bp, synthetic construct
  source 1..51: mol_type = other DNA
cgccgcatcgtaaagtccttgtcgnnkgatgatatcaacaaaattagtggt

SEQ ID NO: 423 - DNA, 51 bp, synthetic construct
  source 1..51: mol_type = other DNA
cgcatcgtaaagtccttgtcgaatnnkgatatcaacaaaattagtggtgac

SEQ ID NO: 424 - DNA, 51 bp, synthetic construct
  source 1..51: mol_type = other DNA
atcgtaaagtccttgtcgaatgatnnkatcaacaaaattagtggtgacatg

SEQ ID NO: 425 - DNA, 51 bp, synthetic construct
  source 1..51: mol_type = other DNA
gtaaagtccttgtcgaatgatgatnnkaacaaaattagtggtgacatgaaa

SEQ ID NO: 426 - DNA, 51 bp, synthetic construct
  source 1..51: mol_type = other DNA
aagtccttgtcgaatgatgatatcnnkaaaattagtggtgacatgaaagac

SEQ ID NO: 427 - DNA, 51 bp, synthetic construct
  source 1..51: mol_type = other DNA
tccttgtcgaatgatgatatcaacnnkattagtggtgacatgaaagactcc

SEQ ID NO: 428 - DNA, 51 bp, synthetic construct
  source 1..51: mol_type = other DNA
ttgtcgaatgatgatatcaacaaannkagtggtgacatgaaagactccctg

SEQ ID NO: 429 - DNA, 51 bp, synthetic construct
  source 1..51: mol_type = other DNA
tcgaatgatgatatcaacaaaattnnkggtgacatgaaagactccctgaaa

SEQ ID NO: 430 - DNA, 51 bp, synthetic construct
  source 1..51: mol_type = other DNA
aatgatgatatcaacaaaattagtnnkgacatgaaagactccctgaaagaa

SEQ ID NO: 431 - DNA, 51 bp, synthetic construct
  source 1..51: mol_type = other DNA
gatgatatcaacaaaattagtggtnnkatgaaagactccctgaaagaaatg

SEQ ID NO: 432 - DNA, 51 bp, synthetic construct
  source 1..51: mol_type = other DNA
gatatcaacaaaattagtggtgacnnkaaagactccctgaaagaaatgtca

SEQ ID NO: 433 - DNA, 51 bp, synthetic construct
  source 1..51: mol_type = other DNA
atcaacaaaattagtggtgacatgnnkgactccctgaaagaaatgtcatta

SEQ ID NO: 434 - DNA, 51 bp, synthetic construct
  source 1..51: mol_type = other DNA
aacaaaattagtggtgacatgaaannktccctgaaagaaatgtcattagag

SEQ ID NO: 435 - DNA, 51 bp, synthetic construct
  source 1..51: mol_type = other DNA
aaaattagtggtgacatgaaagacnnkctgaaagaaatgtcattagaggag

SEQ ID NO: 436 - DNA, 51 bp, synthetic construct
  source 1..51: mol_type = other DNA
attagtggtgacatgaaagactccnnkaaagaaatgtcattagaggagatt

SEQ ID NO: 437 - DNA, 51 bp, synthetic construct
  source 1..51: mol_type = other DNA
agtggtgacatgaaagactccctgnnkgaaatgtcattagaggagatttac

SEQ ID NO: 438 - DNA, 51 bp, synthetic construct
  source 1..51: mol_type = other DNA
ggtgacatgaaagactccctgaaannkatgtcattagaggagatttacagc

SEQ ID NO: 439 - DNA, 51 bp, synthetic construct
  source 1..51: mol_type = other DNA
gacatgaaagactccctgaaagaannktcattagaggagatttacagctac

SEQ ID NO: 440 - DNA, 51 bp, synthetic construct
  source 1..51: mol_type = other DNA
atgaaagactccctgaaagaaatgnnkttagaggagatttacagctacgaa

SEQ ID NO: 441 - DNA, 51 bp, synthetic construct
  source 1..51: mol_type = other DNA
aaagactccctgaaagaaatgtcannkgaggagatttacagctacgaaaaa

SEQ ID NO: 442 - DNA, 51 bp, synthetic construct
  source 1..51: mol_type = other DNA
gactccctgaaagaaatgtcattannkgagatttacagctacgaaaaatac

SEQ ID NO: 443 - DNA, 51 bp, synthetic construct
  source 1..51: mol_type = other DNA
tccctgaaagaaatgtcattagagnnkatttacagctacgaaaaatacgga

SEQ ID NO: 444 - DNA, 51 bp, synthetic construct
  source 1..51: mol_type = other DNA
ctgaaagaaatgtcattagaggagnnktacagctacgaaaaatacggagag

SEQ ID NO: 445 - DNA, 51 bp, synthetic construct
  source 1..51: mol_type = other DNA
aaagaaatgtcattagaggagattnnkagctacgaaaaatacggagagttc

SEQ ID NO: 446 - DNA, 51 bp, synthetic construct
  source 1..51: mol_type = other DNA
gaaatgtcattagaggagatttacnnktacgaaaaatacggagagttcatc

SEQ ID NO: 447 - DNA, 51 bp, synthetic construct
  source 1..51: mol_type = other DNA
atgtcattagaggagatttacagcnnkgaaaaatacggagagttcatcact

SEQ ID NO: 448 - DNA, 51 bp, synthetic construct
  source 1..51: mol_type = other DNA
tcattagaggagatttacagctacnnkaaatacggagagttcatcactcag

SEQ ID NO: 449 - DNA, 51 bp, synthetic construct
  source 1..51: mol_type = other DNA
ttagaggagatttacagctacgaannktacggagagttcatcactcaggaa

SEQ ID NO: 450 - DNA, 51 bp, synthetic construct
  source 1..51: mol_type = other DNA
gaggagatttacagctacgaaaaannkggagagttcatcactcaggaaggt

SEQ ID NO: 451 - DNA, 51 bp, synthetic construct
  source 1..51: mol_type = other DNA
gagatttacagctacgaaaaatacnnkgagttcatcactcaggaaggtatc

SEQ ID NO: 452 - DNA, 51 bp, synthetic construct
  source 1..51: mol_type = other DNA
atttacagctacgaaaaatacggannkttcatcactcaggaaggtatctcc

SEQ ID NO: 453 - DNA, 51 bp, synthetic construct
  source 1..51: mol_type = other DNA
tacagctacgaaaaatacggagagnnkatcactcaggaaggtatctccttt

SEQ ID NO: 454 - DNA, 51 bp, synthetic construct
  source 1..51: mol_type = other DNA
agctacgaaaaatacggagagttcnnkactcaggaaggtatctccttttac

SEQ ID NO: 455 - DNA, 51 bp, synthetic construct
  source 1..51: mol_type = other DNA
tacgaaaaatacggagagttcatcnnkcaggaaggtatctccttttacaac

SEQ ID NO: 456 - DNA, 51 bp, synthetic construct
  source 1..51: mol_type = other DNA
gaaaaatacggagagttcatcactnnkgaaggtatctccttttacaacgat

SEQ ID NO: 457 - DNA, 51 bp, synthetic construct
  source 1..51: mol_type = other DNA
aaatacggagagttcatcactcagnnkggtatctccttttacaacgatatt

SEQ ID NO: 458 - DNA, 51 bp, synthetic construct
  source 1..51: mol_type = other DNA
tacggagagttcatcactcaggaannkatctccttttacaacgatatttgc

SEQ ID NO: 459 - DNA, 51 bp, synthetic construct
  source 1..51: mol_type = other DNA
ggagagttcatcactcaggaaggtnnktccttttacaacgatatttgcggc

SEQ ID NO: 460 - DNA, 51 bp, synthetic construct
  source 1..51: mol_type = other DNA
gagttcatcactcaggaaggtatcnnkttttacaacgatatttgcggcaaa

SEQ ID NO: 461 - DNA, 51 bp, synthetic construct
  source 1..51: mol_type = other DNA
ttcatcactcaggaaggtatctccnnktacaacgatatttgcggcaaagtt

SEQ ID NO: 462 - DNA, 51 bp, synthetic construct
  source 1..51: mol_type = other DNA
atcactcaggaaggtatctcctttnnkaacgatatttgcggcaaagttaat

SEQ ID NO: 463 - DNA, 51 bp, synthetic construct
  source 1..51: mol_type = other DNA
actcaggaaggtatctccttttacnnkgatatttgcggcaaagttaatagt

SEQ ID NO: 464 - DNA, 51 bp, synthetic construct
  source 1..51: mol_type = other DNA
caggaaggtatctccttttacaacnnkatttgcggcaaagttaatagtttc

SEQ ID NO: 465 - DNA, 51 bp, synthetic construct
  source 1..51: mol_type = other DNA
gaaggtatctccttttacaacgatnnktgcggcaaagttaatagtttcatg

SEQ ID NO: 466 - DNA, 51 bp, synthetic construct
  source 1..51: mol_type = other DNA
ggtatctccttttacaacgatattnnkggcaaagttaatagtttcatgaat

SEQ ID NO: 467 - DNA, 51 bp, synthetic construct
  source 1..51: mol_type = other DNA
atctccttttacaacgatatttgcnnkaaagttaatagtttcatgaatctg

SEQ ID NO: 468 - DNA, 51 bp, synthetic construct
  source 1..51: mol_type = other DNA
tccttttacaacgatatttgcggcnnkgttaatagtttcatgaatctgtat

SEQ ID NO: 469 - DNA, 51 bp, synthetic construct
  source 1..51: mol_type = other DNA
ttttacaacgatatttgcggcaaannkaatagtttcatgaatctgtattgt

SEQ ID NO: 470 - DNA, 51 bp, synthetic construct
  source 1..51: mol_type = other DNA
tacaacgatatttgcggcaaagttnnkagtttcatgaatctgtattgtcag

SEQ ID NO: 471 - DNA, 51 bp, synthetic construct
  source 1..51: mol_type = other DNA
aacgatatttgcggcaaagttaatnnkttcatgaatctgtattgtcagaag

SEQ ID NO: 472 - DNA, 51 bp, synthetic construct
  source 1..51: mol_type = other DNA
gatatttgcggcaaagttaatagtnnkatgaatctgtattgtcagaagaat

SEQ ID NO: 473 - DNA, 51 bp, synthetic construct
  source 1..51: mol_type = other DNA
atttgcggcaaagttaatagtttcnnkaatctgtattgtcagaagaataag

SEQ ID NO: 474 - DNA, 51 bp, synthetic construct
  source 1..51: mol_type = other DNA
tgcggcaaagttaatagtttcatgnnkctgtattgtcagaagaataaggaa

SEQ ID NO: 475 - DNA, 51 bp, synthetic construct
  source 1..51: mol_type = other DNA
ggcaaagttaatagtttcatgaatnnktattgtcagaagaataaggaaaac

SEQ ID NO: 476 - DNA, 51 bp, synthetic construct
  source 1..51: mol_type = other DNA
aaagttaatagtttcatgaatctgnnktgtcagaagaataaggaaaacaag

SEQ ID NO: 477 - DNA, 51 bp, synthetic construct
  source 1..51: mol_type = other DNA
gttaatagtttcatgaatctgtatnnkcagaagaataaggaaaacaagaat

SEQ ID NO: 478 - DNA, 51 bp, synthetic construct
  source 1..51: mol_type = other DNA
aatagtttcatgaatctgtattgtnnkaagaataaggaaaacaagaatctg

SEQ ID NO: 479 - DNA, 51 bp, synthetic construct
  source 1..51: mol_type = other DNA
agtttcatgaatctgtattgtcagnnkaataaggaaaacaagaatctgtac

SEQ ID NO: 480 - DNA, 51 bp, synthetic construct
  source 1..51: mol_type = other DNA
ttcatgaatctgtattgtcagaagnnkaaggaaaacaagaatctgtacaag

SEQ ID NO: 481 - DNA, 51 bp, synthetic construct
  source 1..51: mol_type = other DNA
atgaatctgtattgtcagaagaatnnkgaaaacaagaatctgtacaagtta

SEQ ID NO: 482 - DNA, 51 bp, synthetic construct
  source 1..51: mol_type = other DNA
aatctgtattgtcagaagaataagnnkaacaagaatctgtacaagttacaa

SEQ ID NO: 483 - DNA, 51 bp, synthetic construct
  source 1..51: mol_type = other DNA
ctgtattgtcagaagaataaggaannkaagaatctgtacaagttacaaaag

SEQ ID NO: 484 - DNA, 51 bp, synthetic construct
  source 1..51: mol_type = other DNA
tattgtcagaagaataaggaaaacnnkaatctgtacaagttacaaaagctt

SEQ ID NO: 485 - DNA, 51 bp, synthetic construct
  source 1..51: mol_type = other DNA
tgtcagaagaataaggaaaacaagnnkctgtacaagttacaaaagcttcat

SEQ ID NO: 486 - DNA, 51 bp, synthetic construct
  source 1..51: mol_type = other DNA
cagaagaataaggaaaacaagaatnnktacaagttacaaaagcttcataaa

SEQ ID NO: 487 - DNA, 51 bp, synthetic construct
  source 1..51: mol_type = other DNA
aagaataaggaaaacaagaatctgnnkaagttacaaaagcttcataaacag

SEQ ID NO: 488 - DNA, 51 bp, synthetic construct
  source 1..51: mol_type = other DNA
aataaggaaaacaagaatctgtacnnkttacaaaagcttcataaacagatc

SEQ ID NO: 489 - DNA, 51 bp, synthetic construct
  source 1..51: mol_type = other DNA
aaggaaaacaagaatctgtacaagnnkcaaaagcttcataaacagatcttg

SEQ ID NO: 490 - DNA, 51 bp, synthetic construct
  source 1..51: mol_type = other DNA
gaaaacaagaatctgtacaagttannkaagcttcataaacagatcttgtgc

SEQ ID NO: 491 - DNA, 51 bp, synthetic construct
  source 1..51: mol_type = other DNA
aacaagaatctgtacaagttacaannkcttcataaacagatcttgtgcatc

SEQ ID NO: 492 - DNA, 51 bp, synthetic construct
  source 1..51: mol_type = other DNA
aagaatctgtacaagttacaaaagnnkcataaacagatcttgtgcatcgcc

SEQ ID NO: 493 - DNA, 51 bp, synthetic construct
  source 1..51: mol_type = other DNA
aatctgtacaagttacaaaagcttnnkaaacagatcttgtgcatcgccgac

SEQ ID NO: 494 - DNA, 51 bp, synthetic construct
  source 1..51: mol_type = other DNA
ctgtacaagttacaaaagcttcatnnkcagatcttgtgcatcgccgacacg

SEQ ID NO: 495 - DNA, 51 bp, synthetic construct
  source 1..51: mol_type = other DNA
tacaagttacaaaagcttcataaannkatcttgtgcatcgccgacacgtct

SEQ ID NO: 496 - DNA, 51 bp, synthetic construct
  source 1..51: mol_type = other DNA
aagttacaaaagcttcataaacagnnkttgtgcatcgccgacacgtcttat

SEQ ID NO: 497 - DNA, 51 bp, synthetic construct
  source 1..51: mol_type = other DNA
ttacaaaagcttcataaacagatcnnktgcatcgccgacacgtcttatgaa

SEQ ID NO: 498 - DNA, 51 bp, synthetic construct
  source 1..51: mol_type = other DNA
caaaagcttcataaacagatcttgnnkatcgccgacacgtcttatgaagtc

SEQ ID NO: 499 - DNA, 51 bp, synthetic construct
  source 1..51: mol_type = other DNA
aagcttcataaacagatcttgtgcnnkgccgacacgtcttatgaagtcccg

SEQ ID NO: 500 - DNA, 51 bp, synthetic construct
  source 1..51: mol_type = other DNA
cttcataaacagatcttgtgcatcnnkgacacgtcttatgaagtcccgtat

SEQ ID NO: 501 - DNA, 51 bp, synthetic construct
  source 1..51: mol_type = other DNA
cataaacagatcttgtgcatcgccnnkacgtcttatgaagtcccgtataaa

SEQ ID NO: 502 - DNA, 51 bp, synthetic construct
  source 1..51: mol_type = other DNA
aaacagatcttgtgcatcgccgacnnktcttatgaagtcccgtataaattt

SEQ ID NO: 503 - DNA, 51 bp, synthetic construct
  source 1..51: mol_type = other DNA
cagatcttgtgcatcgccgacacgnnktatgaagtcccgtataaatttgaa

SEQ ID NO: 504 - DNA, 51 bp, synthetic construct
  source 1..51: mol_type = other DNA
atcttgtgcatcgccgacacgtctnnkgaagtcccgtataaatttgaaagc

SEQ ID NO: 505 - DNA, 51 bp, synthetic construct
  source 1..51: mol_type = other DNA
ttgtgcatcgccgacacgtcttatnnkgtcccgtataaatttgaaagcgac

SEQ ID NO: 506 - DNA, 51 bp, synthetic construct
  source 1..51: mol_type = other DNA
tgcatcgccgacacgtcttatgaannkccgtataaatttgaaagcgacgaa

SEQ ID NO: 507 - DNA, 51 bp, synthetic construct
  source 1..51: mol_type = other DNA
atcgccgacacgtcttatgaagtcnnktataaatttgaaagcgacgaagaa

SEQ ID NO: 508 - DNA, 51 bp, synthetic construct
  source 1..51: mol_type = other DNA
gccgacacgtcttatgaagtcccgnnkaaatttgaaagcgacgaagaagta

SEQ ID NO: 509 - DNA, 51 bp, synthetic construct
  source 1..51: mol_type = other DNA
gacacgtcttatgaagtcccgtatnnktttgaaagcgacgaagaagtatat

SEQ ID NO: 510 - DNA, 51 bp, synthetic construct
  source 1..51: mol_type = other DNA
acgtcttatgaagtcccgtataaannkgaaagcgacgaagaagtatatcag

SEQ ID NO: 511 - DNA, 51 bp, synthetic construct
  source 1..51: mol_type = other DNA
tcttatgaagtcccgtataaatttnnkagcgacgaagaagtatatcagagt

SEQ ID NO: 512 - DNA, 51 bp, synthetic construct
  source 1..51: mol_type = other DNA
tatgaagtcccgtataaatttgaannkgacgaagaagtatatcagagtgtg

SEQ ID NO: 513 - DNA, 51 bp, synthetic construct
  source 1..51: mol_type = other DNA
gaagtcccgtataaatttgaaagcnnkgaagaagtatatcagagtgtgaat

SEQ ID NO: 514 - DNA, 51 bp, synthetic construct
  source 1..51: mol_type = other DNA
gtcccgtataaatttgaaagcgacnnkgaagtatatcagagtgtgaatgga

SEQ ID NO: 515 - DNA, 51 bp, synthetic construct
  source 1..51: mol_type = other DNA
ccgtataaatttgaaagcgacgaannkgtatatcagagtgtgaatggattc

SEQ ID NO: 516 - DNA, 51 bp, synthetic construct
  source 1..51: mol_type = other DNA
tataaatttgaaagcgacgaagaannktatcagagtgtgaatggattcttg

SEQ ID NO: 517 - DNA, 51 bp, synthetic construct
  source 1..51: mol_type = other DNA
aaatttgaaagcgacgaagaagtannkcagagtgtgaatggattcttggac

SEQ ID NO: 518 - DNA, 51 bp, synthetic construct
  source 1..51: mol_type = other DNA
tttgaaagcgacgaagaagtatatnnkagtgtgaatggattcttggacaat

SEQ ID NO: 519 - DNA, 51 bp, synthetic construct
  source 1..51: mol_type = other DNA
gaaagcgacgaagaagtatatcagnnkgtgaatggattcttggacaatatc

SEQ ID NO: 520 - DNA, 51 bp, synthetic construct
  source 1..51: mol_type = other DNA
agcgacgaagaagtatatcagagtnnkaatggattcttggacaatatctca

SEQ ID NO: 521 - DNA, 51 bp, synthetic construct
  source 1..51: mol_type = other DNA
gacgaagaagtatatcagagtgtgnnkggattcttggacaatatctcatca

SEQ ID NO: 522 - DNA, 51 bp, synthetic construct
  source 1..51: mol_type = other DNA
gaagaagtatatcagagtgtgaatnnkttcttggacaatatctcatcaaaa

SEQ ID NO: 523 - DNA, 51 bp, synthetic construct
  source 1..51: mol_type = other DNA
gaagtatatcagagtgtgaatggannkttggacaatatctcatcaaaacac

SEQ ID NO: 524 - DNA, 51 bp, synthetic construct
  source 1..51: mol_type = other DNA
gtatatcagagtgtgaatggattcnnkgacaatatctcatcaaaacacatt

SEQ ID NO: 525 - DNA, 51 bp, synthetic construct
  source 1..51: mol_type = other DNA
tatcagagtgtgaatggattcttgnnkaatatctcatcaaaacacattgtt

SEQ ID NO: 526 - DNA, 51 bp, synthetic construct
  source 1..51: mol_type = other DNA
cagagtgtgaatggattcttggacnnkatctcatcaaaacacattgttgaa

SEQ ID NO: 527 - DNA, 51 bp, synthetic construct
  source 1..51: mol_type = other DNA
agtgtgaatggattcttggacaatnnktcatcaaaacacattgttgaacgt

SEQ ID NO: 528 - DNA, 51 bp, synthetic construct
  source 1..51: mol_type = other DNA
gtgaatggattcttggacaatatcnnktcaaaacacattgttgaacgtttg

SEQ ID NO: 529 - DNA, 51 bp, synthetic construct
  source 1..51: mol_type = other DNA
aatggattcttggacaatatctcannkaaacacattgttgaacgtttgcgc

SEQ ID NO: 530 - DNA, 51 bp, synthetic construct
  source 1..51: mol_type = other DNA
ggattcttggacaatatctcatcannkcacattgttgaacgtttgcgcaaa

SEQ ID NO: 531 - DNA, 51 bp, synthetic construct
  source 1..51: mol_type = other DNA
ttcttggacaatatctcatcaaaannkattgttgaacgtttgcgcaaaatc

SEQ ID NO: 532 - DNA, 51 bp, synthetic construct
  source 1..51: mol_type = other DNA
ttggacaatatctcatcaaaacacnnkgttgaacgtttgcgcaaaatcggc

SEQ ID NO: 533 - DNA, 51 bp, synthetic construct
  source 1..51: mol_type = other DNA
gacaatatctcatcaaaacacattnnkgaacgtttgcgcaaaatcggcgac

SEQ ID NO: 534 - DNA, 51 bp, synthetic construct
  source 1..51: mol_type = other DNA
aatatctcatcaaaacacattgttnnkcgtttgcgcaaaatcggcgacaac

SEQ ID NO: 535 - DNA, 51 bp, synthetic construct
  source 1..51: mol_type = other DNA
atctcatcaaaacacattgttgaannkttgcgcaaaatcggcgacaactat

SEQ ID NO: 536 - DNA, 51 bp, synthetic construct
  source 1..51: mol_type = other DNA
tcatcaaaacacattgttgaacgtnnkcgcaaaatcggcgacaactataac

SEQ ID NO: 537 - DNA, 51 bp, synthetic construct
  source 1..51: mol_type = other DNA
tcaaaacacattgttgaacgtttgnnkaaaatcggcgacaactataacgga

SEQ ID NO: 538 - DNA, 51 bp, synthetic construct
  source 1..51: mol_type = other DNA
aaacacattgttgaacgtttgcgcnnkatcggcgacaactataacggatac

SEQ ID NO: 539 - DNA, 51 bp, synthetic construct
  source 1..51: mol_type = other DNA
cacattgttgaacgtttgcgcaaannkggcgacaactataacggatacaac

SEQ ID NO: 540 - DNA, 51 bp, synthetic construct
  source 1..51: mol_type = other DNA
attgttgaacgtttgcgcaaaatcnnkgacaactataacggatacaacttg

SEQ ID NO: 541 - DNA, 51 bp, synthetic construct
  source 1..51: mol_type = other DNA
gttgaacgtttgcgcaaaatcggcnnkaactataacggatacaacttggat

SEQ ID NO: 542 - DNA, 51 bp, synthetic construct
  source 1..51: mol_type = other DNA
gaacgtttgcgcaaaatcggcgacnnktataacggatacaacttggataaa

SEQ ID NO: 543 - DNA, 51 bp, synthetic construct
  source 1..51: mol_type = other DNA
cgtttgcgcaaaatcggcgacaacnnkaacggatacaacttggataaaatt

SEQ ID NO: 544 - DNA, 51 bp, synthetic construct
  source 1..51: mol_type = other DNA
ttgcgcaaaatcggcgacaactatnnkggatacaacttggataaaatttat

SEQ ID NO: 545 - DNA, 51 bp, synthetic construct
  source 1..51: mol_type = other DNA
cgcaaaatcggcgacaactataacnnktacaacttggataaaatttatatc

SEQ ID NO: 546 - DNA, 51 bp, synthetic construct
  source 1..51: mol_type = other DNA
aaaatcggcgacaactataacggannkaacttggataaaatttatatcgta

SEQ ID NO: 547 - DNA, 51 bp, synthetic construct
  source 1..51: mol_type = other DNA
atcggcgacaactataacggatacnnkttggataaaatttatatcgtatca

SEQ ID NO: 548 - DNA, 51 bp, synthetic construct
  source 1..51: mol_type = other DNA
ggcgacaactataacggatacaacnnkgataaaatttatatcgtatcaaaa

SEQ ID NO: 549 - DNA, 51 bp, synthetic construct
  source 1..51: mol_type = other DNA
gacaactataacggatacaacttgnnkaaaatttatatcgtatcaaaattt

SEQ ID NO: 550 - DNA, 51 bp, synthetic construct
  source 1..51: mol_type = other DNA
aactataacggatacaacttggatnnkatttatatcgtatcaaaattttat

SEQ ID NO: 551 - DNA, 51 bp, synthetic construct
  source 1..51: mol_type = other DNA
tataacggatacaacttggataaannktatatcgtatcaaaattttatgaa

SEQ ID NO: 552 - DNA, 51 bp, synthetic construct
  source 1..51: mol_type = other DNA
aacggatacaacttggataaaattnnkatcgtatcaaaattttatgaatca

SEQ ID NO: 553 - DNA, 51 bp, synthetic construct
  source 1..51: mol_type = other DNA
ggatacaacttggataaaatttatnnkgtatcaaaattttatgaatcagta

SEQ ID NO: 554 - DNA, 51 bp, synthetic construct
  source 1..51: mol_type = other DNA
tacaacttggataaaatttatatcnnktcaaaattttatgaatcagtatcc

SEQ ID NO: 555 - DNA, 51 bp, synthetic construct
  source 1..51: mol_type = other DNA
aacttggataaaatttatatcgtannkaaattttatgaatcagtatcccaa

SEQ ID NO: 556 - DNA, 51 bp, synthetic construct
  source 1..51: mol_type = other DNA
ttggataaaatttatatcgtatcannkttttatgaatcagtatcccaaaag

SEQ ID NO: 557 - DNA, 51 bp, synthetic construct
  source 1..51: mol_type = other DNA
gataaaatttatatcgtatcaaaannktatgaatcagtatcccaaaagact

SEQ ID NO: 558 - DNA, 51 bp, synthetic construct
  source 1..51: mol_type = other DNA
aaaatttatatcgtatcaaaatttnnkgaatcagtatcccaaaagacttac

SEQ ID NO: 559 - DNA, 51 bp, synthetic construct
  source 1..51: mol_type = other DNA
atttatatcgtatcaaaattttatnnktcagtatcccaaaagacttaccgt

SEQ ID NO: 560 - DNA, 51 bp, synthetic construct
  source 1..51: mol_type = other DNA
tatatcgtatcaaaattttatgaannkgtatcccaaaagacttaccgtgat

SEQ ID NO: 561 - DNA, 51 bp, synthetic construct
  source 1..51: mol_type = other DNA
atcgtatcaaaattttatgaatcannktcccaaaagacttaccgtgattgg

SEQ ID NO: 562 - DNA, 51 bp, synthetic construct
  source 1..51: mol_type = other DNA
gtatcaaaattttatgaatcagtannkcaaaagacttaccgtgattgggag

SEQ ID NO: 563 - DNA, 51 bp, synthetic construct
  source 1..51: mol_type = other DNA
tcaaaattttatgaatcagtatccnnkaagacttaccgtgattgggagact

SEQ ID NO: 564 - DNA, 51 bp, synthetic construct
  source 1..51: mol_type = other DNA
aaattttatgaatcagtatcccaannkacttaccgtgattgggagactatt

SEQ ID NO: 565 - DNA, 51 bp, synthetic construct
  source 1..51: mol_type = other DNA
ttttatgaatcagtatcccaaaagnnktaccgtgattgggagactattaat

SEQ ID NO: 566 - DNA, 51 bp, synthetic construct
  source 1..51: mol_type = other DNA
tatgaatcagtatcccaaaagactnnkcgtgattgggagactattaatacg

SEQ ID NO: 567 - DNA, 51 bp, synthetic construct
  source 1..51: mol_type = other DNA
gaatcagtatcccaaaagacttacnnkgattgggagactattaatacggcg

SEQ ID NO: 568 - DNA, 51 bp, synthetic construct
  source 1..51: mol_type = other DNA
tcagtatcccaaaagacttaccgtnnktgggagactattaatacggcgtta

SEQ ID NO: 569 - DNA, 51 bp, synthetic construct
  source 1..51: mol_type = other DNA
gtatcccaaaagacttaccgtgatnnkgagactattaatacggcgttagaa

SEQ ID NO: 570 - DNA, 51 bp, synthetic construct
  source 1..51: mol_type = other DNA
tcccaaaagacttaccgtgattggnnkactattaatacggcgttagaaatc

SEQ ID NO: 571 - DNA, 51 bp, synthetic construct
  source 1..51: mol_type = other DNA
caaaagacttaccgtgattgggagnnkattaatacggcgttagaaatccat

SEQ ID NO: 572 - DNA, 51 bp, synthetic construct
  source 1..51: mol_type = other DNA
aagacttaccgtgattgggagactnnkaatacggcgttagaaatccattac

SEQ ID NO: 573 - DNA, 51 bp, synthetic construct
  source 1..51: mol_type = other DNA
acttaccgtgattgggagactattnnkacggcgttagaaatccattacaac

SEQ ID NO: 574 - DNA, 51 bp, synthetic construct
  source 1..51: mol_type = other DNA
taccgtgattgggagactattaatnnkgcgttagaaatccattacaacaac

SEQ ID NO: 575 - DNA, 51 bp, synthetic construct
  source 1..51: mol_type = other DNA
cgtgattgggagactattaatacgnnkttagaaatccattacaacaacatt

SEQ ID NO: 576 - DNA, 51 bp, synthetic construct
  source 1..51: mol_type = other DNA
gattgggagactattaatacggcgnnkgaaatccattacaacaacattctg

SEQ ID NO: 577 - DNA, 51 bp, synthetic construct
  source 1..51: mol_type = other DNA
tgggagactattaatacggcgttannkatccattacaacaacattctgccg

SEQ ID NO: 578 - DNA, 51 bp, synthetic construct
  source 1..51: mol_type = other DNA
gagactattaatacggcgttagaannkcattacaacaacattctgccgggt

SEQ ID NO: 579 - DNA, 51 bp, synthetic construct
  source 1..51: mol_type = other DNA
actattaatacggcgttagaaatcnnktacaacaacattctgccgggtaac

SEQ ID NO: 580 - DNA, 51 bp, synthetic construct
  source 1..51: mol_type = other DNA
attaatacggcgttagaaatccatnnkaacaacattctgccgggtaacggt

SEQ ID NO: 581 - DNA, 51 bp, synthetic construct
  source 1..51: mol_type = other DNA
aatacggcgttagaaatccattacnnkaacattctgccgggtaacggtaaa

SEQ ID NO: 582 - DNA, 51 bp, synthetic construct
  source 1..51: mol_type = other DNA
acggcgttagaaatccattacaacnnkattctgccgggtaacggtaaatcg

SEQ ID NO: 583 - DNA, 51 bp, synthetic construct
  source 1..51: mol_type = other DNA
gcgttagaaatccattacaacaacnnkctgccgggtaacggtaaatcgaaa

SEQ ID NO: 584 - DNA, 51 bp, synthetic construct
  source 1..51: mol_type = other DNA
ttagaaatccattacaacaacattnnkccgggtaacggtaaatcgaaagcg

SEQ ID NO: 585 - DNA, 51 bp, synthetic construct
  source 1..51: mol_type = other DNA
gaaatccattacaacaacattctgnnkggtaacggtaaatcgaaagcggac

SEQ ID NO: 586 - DNA, 51 bp, synthetic construct
  source 1..51: mol_type = other DNA
atccattacaacaacattctgccgnnkaacggtaaatcgaaagcggacaaa

SEQ ID NO: 587 - DNA, 51 bp, synthetic construct
  source 1..51: mol_type = other DNA
cattacaacaacattctgccgggtnnkggtaaatcgaaagcggacaaagtg

SEQ ID NO: 588 - DNA, 51 bp, synthetic construct
  source 1..51: mol_type = other DNA
tacaacaacattctgccgggtaacnnkaaatcgaaagcggacaaagtgaag

SEQ ID NO: 589 - DNA, 51 bp, synthetic construct
  source 1..51: mol_type = other DNA
aacaacattctgccgggtaacggtnnktcgaaagcggacaaagtgaagaag

SEQ ID NO: 590 - DNA, 51 bp, synthetic construct
  source 1..51: mol_type = other DNA
aacattctgccgggtaacggtaaannkaaagcggacaaagtgaagaaggcg

SEQ ID NO: 591 - DNA, 51 bp, synthetic construct
  source 1..51: mol_type = other DNA
attctgccgggtaacggtaaatcgnnkgcggacaaagtgaagaaggcggtt

SEQ ID NO: 592 - DNA, 51 bp, synthetic construct
  source 1..51: mol_type = other DNA
ctgccgggtaacggtaaatcgaaannkgacaaagtgaagaaggcggttaag

SEQ ID NO: 593 - DNA, 51 bp, synthetic construct
  source 1..51: mol_type = other DNA
ccgggtaacggtaaatcgaaagcgnnkaaagtgaagaaggcggttaagaac

SEQ ID NO: 594 - DNA, 51 bp, synthetic construct
  source 1..51: mol_type = other DNA
ggtaacggtaaatcgaaagcggacnnkgtgaagaaggcggttaagaacgat

SEQ ID NO: 595 - DNA, 51 bp, synthetic construct
  source 1..51: mol_type = other DNA
aacggtaaatcgaaagcggacaaannkaagaaggcggttaagaacgatctt

SEQ ID NO: 596 - DNA, 51 bp, synthetic construct
  source 1..51: mol_type = other DNA
ggtaaatcgaaagcggacaaagtgnnkaaggcggttaagaacgatcttcag

SEQ ID NO: 597 - DNA, 51 bp, synthetic construct
  source 1..51: mol_type = other DNA
aaatcgaaagcggacaaagtgaagnnkgcggttaagaacgatcttcagaag

SEQ ID NO: 598 - DNA, 51 bp, synthetic construct
  source 1..51: mol_type = other DNA
tcgaaagcggacaaagtgaagaagnnkgttaagaacgatcttcagaagtct

SEQ ID NO: 599 - DNA, 51 bp, synthetic construct
  source 1..51: mol_type = other DNA
aaagcggacaaagtgaagaaggcgnnkaagaacgatcttcagaagtctatc

SEQ ID NO: 600 - DNA, 51 bp, synthetic construct
  source 1..51: mol_type = other DNA
gcggacaaagtgaagaaggcggttnnkaacgatcttcagaagtctatcacg

SEQ ID NO: 601 - DNA, 51 bp, synthetic construct
  source 1..51: mol_type = other DNA
gacaaagtgaagaaggcggttaagnnkgatcttcagaagtctatcacggag

SEQ ID NO: 602 - DNA, 51 bp, synthetic construct
  source 1..51: mol_type = other DNA
aaagtgaagaaggcggttaagaacnnkcttcagaagtctatcacggagatt

SEQ ID NO: 603 - DNA, 51 bp, synthetic construct
  source 1..51: mol_type = other DNA
gtgaagaaggcggttaagaacgatnnkcagaagtctatcacggagattaat

SEQ ID NO: 604 - DNA, 51 bp, synthetic construct
  source 1..51: mol_type = other DNA
aagaaggcggttaagaacgatcttnnkaagtctatcacggagattaatgag

SEQ ID NO: 605 - DNA, 51 bp, synthetic construct
  source 1..51: mol_type = other DNA
aaggcggttaagaacgatcttcagnnktctatcacggagattaatgagctg

SEQ ID NO: 606 - DNA, 51 bp, synthetic construct
  source 1..51: mol_type = other DNA
gcggttaagaacgatcttcagaagnnkatcacggagattaatgagctggtt

SEQ ID NO: 607 - DNA, 51 bp, synthetic construct
  source 1..51: mol_type = other DNA
gttaagaacgatcttcagaagtctnnkacggagattaatgagctggtttcc

SEQ ID NO: 608 - DNA, 51 bp, synthetic construct
  source 1..51: mol_type = other DNA
aagaacgatcttcagaagtctatcnnkgagattaatgagctggtttccaat

SEQ ID NO: 609 - DNA, 51 bp, synthetic construct
  source 1..51: mol_type = other DNA
aacgatcttcagaagtctatcacgnnkattaatgagctggtttccaattac

SEQ ID NO: 610 - DNA, 51 bp, synthetic construct
  source 1..51: mol_type = other DNA
gatcttcagaagtctatcacggagnnkaatgagctggtttccaattacaag

SEQ ID NO: 611 - DNA, 51 bp, synthetic construct
  source 1..51: mol_type = other DNA
cttcagaagtctatcacggagattnnkgagctggtttccaattacaagttg

SEQ ID NO: 612 - DNA, 51 bp, synthetic construct
  source 1..51: mol_type = other DNA
cagaagtctatcacggagattaatnnkctggtttccaattacaagttgtgc

SEQ ID NO: 613 - DNA, 51 bp, synthetic construct
  source 1..51: mol_type = other DNA
aagtctatcacggagattaatgagnnkgtttccaattacaagttgtgctcg

SEQ ID NO: 614 - DNA, 51 bp, synthetic construct
  source 1..51: mol_type = other DNA
tctatcacggagattaatgagctgnnktccaattacaagttgtgctcggat

SEQ ID NO: 615 - DNA, 51 bp, synthetic construct
  source 1..51: mol_type = other DNA
atcacggagattaatgagctggttnnkaattacaagttgtgctcggatgat

SEQ ID NO: 616 - DNA, 51 bp, synthetic construct
  source 1..51: mol_type = other DNA
acggagattaatgagctggtttccnnktacaagttgtgctcggatgataac

SEQ ID NO: 617 - DNA, 51 bp, synthetic construct
  source 1..51: mol_type = other DNA
gagattaatgagctggtttccaatnnkaagttgtgctcggatgataacatc

SEQ ID NO: 618 - DNA, 51 bp, synthetic construct
  source 1..51: mol_type = other DNA
attaatgagctggtttccaattacnnkttgtgctcggatgataacatcaaa

SEQ ID NO: 619 - DNA, 51 bp, synthetic construct
  source 1..51: mol_type = other DNA
aatgagctggtttccaattacaagnnktgctcggatgataacatcaaagct

SEQ ID NO: 620 - DNA, 51 bp, synthetic construct
  source 1..51: mol_type = other DNA
gagctggtttccaattacaagttgnnktcggatgataacatcaaagctgaa

SEQ ID NO: 621 - DNA, 51 bp, synthetic construct
  source 1..51: mol_type = other DNA
ctggtttccaattacaagttgtgcnnkgatgataacatcaaagctgaaacc

SEQ ID NO: 622 - DNA, 51 bp, synthetic construct
  source 1..51: mol_type = other DNA
gtttccaattacaagttgtgctcgnnkgataacatcaaagctgaaacctat

SEQ ID NO: 623 - DNA, 51 bp, synthetic construct
  source 1..51: mol_type = other DNA
tccaattacaagttgtgctcggatnnkaacatcaaagctgaaacctatatc

SEQ ID NO: 624 - DNA, 51 bp, synthetic construct
  source 1..51: mol_type = other DNA
aattacaagttgtgctcggatgatnnkatcaaagctgaaacctatatccat

SEQ ID NO: 625 - DNA, 51 bp, synthetic construct
  source 1..51: mol_type = other DNA
tacaagttgtgctcggatgataacnnkaaagctgaaacctatatccatgaa

SEQ ID NO: 626 - DNA, 51 bp, synthetic construct
  source 1..51: mol_type = other DNA
aagttgtgctcggatgataacatcnnkgctgaaacctatatccatgaaatt

SEQ ID NO: 627 - DNA, 51 bp, synthetic construct
  source 1..51: mol_type = other DNA
ttgtgctcggatgataacatcaaannkgaaacctatatccatgaaatttct

SEQ ID NO: 628 - DNA, 51 bp, synthetic construct
  source 1..51: mol_type = other DNA
tgctcggatgataacatcaaagctnnkacctatatccatgaaatttctcat

SEQ ID NO: 629 - DNA, 51 bp, synthetic construct
  source 1..51: mol_type = other DNA
tcggatgataacatcaaagctgaannktatatccatgaaatttctcatatt

SEQ ID NO: 630 - DNA, 51 bp, synthetic construct
  source 1..51: mol_type = other DNA
gatgataacatcaaagctgaaaccnnkatccatgaaatttctcatattctt

SEQ ID NO: 631 - DNA, 51 bp, synthetic construct
  source 1..51: mol_type = other DNA
gataacatcaaagctgaaacctatnnkcatgaaatttctcatattcttaat

SEQ ID NO: 632 - DNA, 51 bp, synthetic construct
  source 1..51: mol_type = other DNA
aacatcaaagctgaaacctatatcnnkgaaatttctcatattcttaataac

SEQ ID NO: 633 - DNA, 51 bp, synthetic construct
  source 1..51: mol_type = other DNA
atcaaagctgaaacctatatccatnnkatttctcatattcttaataacttc

SEQ ID NO: 634 - DNA, 51 bp, synthetic construct
  source 1..51: mol_type = other DNA
aaagctgaaacctatatccatgaannktctcatattcttaataacttcgag

SEQ ID NO: 635 - DNA, 51 bp, synthetic construct
  source 1..51: mol_type = other DNA
gctgaaacctatatccatgaaattnnkcatattcttaataacttcgaggca

SEQ ID NO: 636 - DNA, 51 bp, synthetic construct
  source 1..51: mol_type = other DNA
gaaacctatatccatgaaatttctnnkattcttaataacttcgaggcacaa

SEQ ID NO: 637 - DNA, 51 bp, synthetic construct
  source 1..51: mol_type = other DNA
acctatatccatgaaatttctcatnnkcttaataacttcgaggcacaagaa

SEQ ID NO: 638 - DNA, 51 bp, synthetic construct
  source 1..51: mol_type = other DNA
tatatccatgaaatttctcatattnnkaataacttcgaggcacaagaatta

SEQ ID NO: 639 - DNA, 51 bp, synthetic construct
  source 1..51: mol_type = other DNA
atccatgaaatttctcatattcttnnkaacttcgaggcacaagaattaaaa

SEQ ID NO: 640 - DNA, 51 bp, synthetic construct
  source 1..51: mol_type = other DNA
catgaaatttctcatattcttaatnnkttcgaggcacaagaattaaaatat

SEQ ID NO: 641 - DNA, 51 bp, synthetic construct
  source 1..51: mol_type = other DNA
gaaatttctcatattcttaataacnnkgaggcacaagaattaaaatataac

SEQ ID NO: 642 - DNA, 51 bp, synthetic construct
  source 1..51: mol_type = other DNA
atttctcatattcttaataacttcnnkgcacaagaattaaaatataaccca

SEQ ID NO: 643 - DNA, 51 bp, synthetic construct
  source 1..51: mol_type = other DNA
tctcatattcttaataacttcgagnnkcaagaattaaaatataacccagaa

SEQ ID NO: 644 - DNA, 51 bp, synthetic construct
  source 1..51: mol_type = other DNA
catattcttaataacttcgaggcannkgaattaaaatataacccagaaatt

SEQ ID NO: 645 - DNA, 51 bp, synthetic construct
  source 1..51: mol_type = other DNA
attcttaataacttcgaggcacaannkttaaaatataacccagaaattcat

SEQ ID NO: 646 - DNA, 51 bp, synthetic construct
  source 1..51: mol_type = other DNA
cttaataacttcgaggcacaagaannkaaatataacccagaaattcatctg

SEQ ID NO: 647 - DNA, 51 bp, synthetic construct
  source 1..51: mol_type = other DNA
aataacttcgaggcacaagaattannktataacccagaaattcatctggtt

SEQ ID NO: 648 - DNA, 51 bp, synthetic construct
  source 1..51: mol_type = other DNA
aacttcgaggcacaagaattaaaannkaacccagaaattcatctggttgag

SEQ ID NO: 649 - DNA, 51 bp, synthetic construct
  source 1..51: mol_type = other DNA
ttcgaggcacaagaattaaaatatnnkccagaaattcatctggttgagagc

SEQ ID NO: 650 - DNA, 51 bp, synthetic construct
  source 1..51: mol_type = other DNA
gaggcacaagaattaaaatataacnnkgaaattcatctggttgagagcgaa

SEQ ID NO: 651 - DNA, 51 bp, synthetic construct
  source 1..51: mol_type = other DNA
gcacaagaattaaaatataacccannkattcatctggttgagagcgaactt

SEQ ID NO: 652 - DNA, 51 bp, synthetic construct
  source 1..51: mol_type = other DNA
caagaattaaaatataacccagaannkcatctggttgagagcgaacttaaa

SEQ ID NO: 653 - DNA, 51 bp, synthetic construct
  source 1..51: mol_type = other DNA
gaattaaaatataacccagaaattnnkctggttgagagcgaacttaaagct

SEQ ID NO: 654 - DNA, 51 bp, synthetic construct
  source 1..51: mol_type = other DNA
ttaaaatataacccagaaattcatnnkgttgagagcgaacttaaagcttca

SEQ ID NO: 655 - DNA, 51 bp, synthetic construct
  source 1..51: mol_type = other DNA
aaatataacccagaaattcatctgnnkgagagcgaacttaaagcttcagaa

SEQ ID NO: 656 - DNA, 51 bp, synthetic construct
  source 1..51: mol_type = other DNA
tataacccagaaattcatctggttnnkagcgaacttaaagcttcagaatta

SEQ ID NO: 657 - DNA, 51 bp, synthetic construct
  source 1..51: mol_type = other DNA
aacccagaaattcatctggttgagnnkgaacttaaagcttcagaattaaaa

SEQ ID NO: 658 - DNA, 51 bp, synthetic construct
  source 1..51: mol_type = other DNA
ccagaaattcatctggttgagagcnnkcttaaagcttcagaattaaaaaat

SEQ ID NO: 659 - DNA, 51 bp, synthetic construct
  source 1..51: mol_type = other DNA
gaaattcatctggttgagagcgaannkaaagcttcagaattaaaaaatgtt

SEQ ID NO: 660 - DNA, 51 bp, synthetic construct
  source 1..51: mol_type = other DNA
attcatctggttgagagcgaacttnnkgcttcagaattaaaaaatgttttg

SEQ ID NO: 661 - DNA, 51 bp, synthetic construct
  source 1..51: mol_type = other DNA
catctggttgagagcgaacttaaannktcagaattaaaaaatgttttggac

SEQ ID NO: 662 - DNA, 51 bp, synthetic construct
  source 1..51: mol_type = other DNA
ctggttgagagcgaacttaaagctnnkgaattaaaaaatgttttggacgta

SEQ ID NO: 663 - DNA, 51 bp, synthetic construct
  source 1..51: mol_type = other DNA
gttgagagcgaacttaaagcttcannkttaaaaaatgttttggacgtaatt

SEQ ID NO: 664 - DNA, 51 bp, synthetic construct
  source 1..51: mol_type = other DNA
gagagcgaacttaaagcttcagaannkaaaaatgttttggacgtaattatg

SEQ ID NO: 665 - DNA, 51 bp, synthetic construct
  source 1..51: mol_type = other DNA
agcgaacttaaagcttcagaattannkaatgttttggacgtaattatgaac

SEQ ID NO: 666 - DNA, 51 bp, synthetic construct
  source 1..51: mol_type = other DNA
gaacttaaagcttcagaattaaaannkgttttggacgtaattatgaacgcc

SEQ ID NO: 667 - DNA, 51 bp, synthetic construct
  source 1..51: mol_type = other DNA
cttaaagcttcagaattaaaaaatnnkttggacgtaattatgaacgccttc

SEQ ID NO: 668 - DNA, 51 bp, synthetic construct
  source 1..51: mol_type = other DNA
aaagcttcagaattaaaaaatgttnnkgacgtaattatgaacgccttccat

SEQ ID NO: 669 - DNA, 51 bp, synthetic construct
  source 1..51: mol_type = other DNA
gcttcagaattaaaaaatgttttgnnkgtaattatgaacgccttccattgg

SEQ ID NO: 670 - DNA, 51 bp, synthetic construct
  source 1..51: mol_type = other DNA
tcagaattaaaaaatgttttggacnnkattatgaacgccttccattggtgc

SEQ ID NO: 671 - DNA, 51 bp, synthetic construct
  source 1..51: mol_type = other DNA
gaattaaaaaatgttttggacgtannkatgaacgccttccattggtgcagc

SEQ ID NO: 672 - DNA, 51 bp, synthetic construct
  source 1..51: mol_type = other DNA
ttaaaaaatgttttggacgtaattnnkaacgccttccattggtgcagcgtg

SEQ ID NO: 673 - DNA, 51 bp, synthetic construct
  source 1..51: mol_type = other DNA
aaaaatgttttggacgtaattatgnnkgccttccattggtgcagcgtgttt

SEQ ID NO: 674 - DNA, 51 bp, synthetic construct
  source 1..51: mol_type = other DNA
aatgttttggacgtaattatgaacnnkttccattggtgcagcgtgtttatg

SEQ ID NO: 675 - DNA, 51 bp, synthetic construct
  source 1..51: mol_type = other DNA
gttttggacgtaattatgaacgccnnkcattggtgcagcgtgtttatgaca

SEQ ID NO: 676 - DNA, 51 bp, synthetic construct
  source 1..51: mol_type = other DNA
ttggacgtaattatgaacgccttcnnktggtgcagcgtgtttatgacagag

SEQ ID NO: 677 - DNA, 51 bp, synthetic construct
  source 1..51: mol_type = other DNA
gacgtaattatgaacgccttccatnnktgcagcgtgtttatgacagaggag

SEQ ID NO: 678 - DNA, 51 bp, synthetic construct
  source 1..51: mol_type = other DNA
gtaattatgaacgccttccattggnnkagcgtgtttatgacagaggagtta

SEQ ID NO: 679 - DNA, 51 bp, synthetic construct
  source 1..51: mol_type = other DNA
attatgaacgccttccattggtgcnnkgtgtttatgacagaggagttagta

SEQ ID NO: 680 - DNA, 51 bp, synthetic construct
  source 1..51: mol_type = other DNA
atgaacgccttccattggtgcagcnnktttatgacagaggagttagtagat

SEQ ID NO: 681 - DNA, 51 bp, synthetic construct
  source 1..51: mol_type = other DNA
aacgccttccattggtgcagcgtgnnkatgacagaggagttagtagataag

SEQ ID NO: 682 - DNA, 51 bp, synthetic construct
  source 1..51: mol_type = other DNA
gccttccattggtgcagcgtgtttnnkacagaggagttagtagataaggat

SEQ ID NO: 683 - DNA, 51 bp, synthetic construct
  source 1..51: mol_type = other DNA
ttccattggtgcagcgtgtttatgnnkgaggagttagtagataaggataac

SEQ ID NO: 684 - DNA, 51 bp, synthetic construct
  source 1..51: mol_type = other DNA
cattggtgcagcgtgtttatgacannkgagttagtagataaggataacaac

SEQ ID NO: 685 - DNA, 51 bp, synthetic construct
  source 1..51: mol_type = other DNA
tggtgcagcgtgtttatgacagagnnkttagtagataaggataacaacttt

SEQ ID NO: 686 - DNA, 51 bp, synthetic construct
  source 1..51: mol_type = other DNA
tgcagcgtgtttatgacagaggagnnkgtagataaggataacaacttttat

SEQ ID NO: 687 - DNA, 51 bp, synthetic construct
  source 1..51: mol_type = other DNA
agcgtgtttatgacagaggagttannkgataaggataacaacttttatgca

SEQ ID NO: 688 - DNA, 51 bp, synthetic construct
  source 1..51: mol_type = other DNA
gtgtttatgacagaggagttagtannkaaggataacaacttttatgcagaa

SEQ ID NO: 689 - DNA, 51 bp, synthetic construct
  source 1..51: mol_type = other DNA
tttatgacagaggagttagtagatnnkgataacaacttttatgcagaattg

SEQ ID NO: 690 - DNA, 51 bp, synthetic construct
  source 1..51: mol_type = other DNA
atgacagaggagttagtagataagnnkaacaacttttatgcagaattggaa

SEQ ID NO: 691 - DNA, 51 bp, synthetic construct
  source 1..51: mol_type = other DNA
acagaggagttagtagataaggatnnkaacttttatgcagaattggaagag

SEQ ID NO: 692 - DNA, 51 bp, synthetic construct
  source 1..51: mol_type = other DNA
gaggagttagtagataaggataacnnkttttatgcagaattggaagagatc

SEQ ID NO: 693 - DNA, 51 bp, synthetic construct
  source 1..51: mol_type = other DNA
gagttagtagataaggataacaacnnktatgcagaattggaagagatctat

SEQ ID NO: 694 - DNA, 51 bp, synthetic construct
  source 1..51: mol_type = other DNA
ttagtagataaggataacaactttnnkgcagaattggaagagatctatgat

SEQ ID NO: 695 - DNA, 51 bp, synthetic construct
  source 1..51: mol_type = other DNA
gtagataaggataacaacttttatnnkgaattggaagagatctatgatgag

SEQ ID NO: 696 - DNA, 51 bp, synthetic construct
  source 1..51: mol_type = other DNA
gataaggataacaacttttatgcannkttggaagagatctatgatgagatc

SEQ ID NO: 697 - DNA, 51 bp, synthetic construct
  source 1..51: mol_type = other DNA
aaggataacaacttttatgcagaannkgaagagatctatgatgagatctat

SEQ ID NO: 698 - DNA, 51 bp, synthetic construct
  source 1..51: mol_type = other DNA
gataacaacttttatgcagaattgnnkgagatctatgatgagatctatcca

SEQ ID NO: 699 - DNA, 51 bp, synthetic construct
  source 1..51: mol_type = other DNA
aacaacttttatgcagaattggaannkatctatgatgagatctatccagtg

SEQ ID NO: 700 - DNA, 51 bp, synthetic construct
  source 1..51: mol_type = other DNA
aacttttatgcagaattggaagagnnktatgatgagatctatccagtgatt

SEQ ID NO: 701 - DNA, 51 bp, synthetic construct
  source 1..51: mol_type = other DNA
ttttatgcagaattggaagagatcnnkgatgagatctatccagtgatttca

SEQ ID NO: 702 - DNA, 51 bp, synthetic construct
  source 1..51: mol_type = other DNA
tatgcagaattggaagagatctatnnkgagatctatccagtgatttcactg

SEQ ID NO: 703 - DNA, 51 bp, synthetic construct
  source 1..51: mol_type = other DNA
gcagaattggaagagatctatgatnnkatctatccagtgatttcactgtat

SEQ ID NO: 704 - DNA, 51 bp, synthetic construct
  source 1..51: mol_type = other DNA
gaattggaagagatctatgatgagnnktatccagtgatttcactgtataac

SEQ ID NO: 705 - DNA, 51 bp, synthetic construct
  source 1..51: mol_type = other DNA
ttggaagagatctatgatgagatcnnkccagtgatttcactgtataactta

SEQ ID NO: 706 - DNA, 51 bp, synthetic construct
  source 1..51: mol_type = other DNA
gaagagatctatgatgagatctatnnkgtgatttcactgtataacttagtc

SEQ ID NO: 707 - DNA, 51 bp, synthetic construct
  source 1..51: mol_type = other DNA
gagatctatgatgagatctatccannkatttcactgtataacttagtccgt

SEQ ID NO: 708 - DNA, 51 bp, synthetic construct
  source 1..51: mol_type = other DNA
atctatgatgagatctatccagtgnnktcactgtataacttagtccgtaat

SEQ ID NO: 709 - DNA, 51 bp, synthetic construct
  source 1..51: mol_type = other DNA
tatgatgagatctatccagtgattnnkctgtataacttagtccgtaattac

SEQ ID NO: 710 - DNA, 51 bp, synthetic construct
  source 1..51: mol_type = other DNA
gatgagatctatccagtgatttcannktataacttagtccgtaattacgtc

SEQ ID NO: 711 - DNA, 51 bp, synthetic construct
  source 1..51: mol_type = other DNA
gagatctatccagtgatttcactgnnkaacttagtccgtaattacgtcact

SEQ ID NO: 712 - DNA, 51 bp, synthetic construct
  source 1..51: mol_type = other DNA
atctatccagtgatttcactgtatnnkttagtccgtaattacgtcactcag

SEQ ID NO: 713 - DNA, 51 bp, synthetic construct
  source 1..51: mol_type = other DNA
tatccagtgatttcactgtataacnnkgtccgtaattacgtcactcagaag

SEQ ID NO: 714 - DNA, 51 bp, synthetic construct
  source 1..51: mol_type = other DNA
ccagtgatttcactgtataacttannkcgtaattacgtcactcagaagccg

SEQ ID NO: 715 - DNA, 51 bp, synthetic construct
  source 1..51: mol_type = other DNA
gtgatttcactgtataacttagtcnnkaattacgtcactcagaagccgtac

SEQ ID NO: 716 - DNA, 51 bp, synthetic construct
  source 1..51: mol_type = other DNA
atttcactgtataacttagtccgtnnktacgtcactcagaagccgtactca

SEQ ID NO: 717 - DNA, 51 bp, synthetic construct
  source 1..51: mol_type = other DNA
tcactgtataacttagtccgtaatnnkgtcactcagaagccgtactcaact

SEQ ID NO: 718 - DNA, 51 bp, synthetic construct
  source 1..51: mol_type = other DNA
ctgtataacttagtccgtaattacnnkactcagaagccgtactcaactaaa

SEQ ID NO: 719 - DNA, 51 bp, synthetic construct
  source 1..51: mol_type = other DNA
tataacttagtccgtaattacgtcnnkcagaagccgtactcaactaaaaag

SEQ ID NO: 720 - DNA, 51 bp, synthetic construct
  source 1..51: mol_type = other DNA
aacttagtccgtaattacgtcactnnkaagccgtactcaactaaaaagatc

SEQ ID NO: 721 - DNA, 51 bp, synthetic construct
  source 1..51: mol_type = other DNA
ttagtccgtaattacgtcactcagnnkccgtactcaactaaaaagatcaag

SEQ ID NO: 722 - DNA, 51 bp, synthetic construct
  source 1..51: mol_type = other DNA
gtccgtaattacgtcactcagaagnnktactcaactaaaaagatcaagtta

SEQ ID NO: 723 - DNA, 51 bp, synthetic construct
  source 1..51: mol_type = other DNA
cgtaattacgtcactcagaagccgnnktcaactaaaaagatcaagttaaat

SEQ ID NO: 724 - DNA, 51 bp, synthetic construct
  source 1..51: mol_type = other DNA
aattacgtcactcagaagccgtacnnkactaaaaagatcaagttaaatttt

SEQ ID NO: 725 - DNA, 51 bp, synthetic construct
  source 1..51: mol_type = other DNA
tacgtcactcagaagccgtactcannkaaaaagatcaagttaaattttgga

SEQ ID NO: 726 - DNA, 51 bp, synthetic construct
  source 1..51: mol_type = other DNA
gtcactcagaagccgtactcaactnnkaagatcaagttaaattttggaatt

SEQ ID NO: 727 - DNA, 51 bp, synthetic construct
  source 1..51: mol_type = other DNA
actcagaagccgtactcaactaaannkatcaagttaaattttggaattccg

SEQ ID NO: 728 - DNA, 51 bp, synthetic construct
  source 1..51: mol_type = other DNA
cagaagccgtactcaactaaaaagnnkaagttaaattttggaattccgaca

SEQ ID NO: 729 - DNA, 51 bp, synthetic construct
  source 1..51: mol_type = other DNA
aagccgtactcaactaaaaagatcnnkttaaattttggaattccgacattg

SEQ ID NO: 730 - DNA, 51 bp, synthetic construct
  source 1..51: mol_type = other DNA
ccgtactcaactaaaaagatcaagnnkaattttggaattccgacattggcg

SEQ ID NO: 731 - DNA, 51 bp, synthetic construct
  source 1..51: mol_type = other DNA
tactcaactaaaaagatcaagttannktttggaattccgacattggcggat

SEQ ID NO: 732 - DNA, 51 bp, synthetic construct
  source 1..51: mol_type = other DNA
tcaactaaaaagatcaagttaaatnnkggaattccgacattggcggatggt

SEQ ID NO: 733 - DNA, 51 bp, synthetic construct
  source 1..51: mol_type = other DNA
actaaaaagatcaagttaaattttnnkattccgacattggcggatggttgg

SEQ ID NO: 734 - DNA, 51 bp, synthetic construct
  source 1..51: mol_type = other DNA
aaaaagatcaagttaaattttggannkccgacattggcggatggttggagt

SEQ ID NO: 735 - DNA, 51 bp, synthetic construct
  source 1..51: mol_type = other DNA
aagatcaagttaaattttggaattnnkacattggcggatggttggagtaag

SEQ ID NO: 736 - DNA, 51 bp, synthetic construct
  source 1..51: mol_type = other DNA
atcaagttaaattttggaattccgnnkttggcggatggttggagtaagtct

SEQ ID NO: 737 - DNA, 51 bp, synthetic construct
  source 1..51: mol_type = other DNA
aagttaaattttggaattccgacannkgcggatggttggagtaagtctaag

SEQ ID NO: 738 - DNA, 51 bp, synthetic construct
  source 1..51: mol_type = other DNA
ttaaattttggaattccgacattgnnkgatggttggagtaagtctaaggaa

SEQ ID NO: 739 - DNA, 51 bp, synthetic construct
  source 1..51: mol_type = other DNA
aattttggaattccgacattggcgnnkggttggagtaagtctaaggaatac

SEQ ID NO: 740 - DNA, 51 bp, synthetic construct
  source 1..51: mol_type = other DNA
tttggaattccgacattggcggatnnktggagtaagtctaaggaatactca

SEQ ID NO: 741 - DNA, 51 bp, synthetic construct
  source 1..51: mol_type = other DNA
ggaattccgacattggcggatggtnnkagtaagtctaaggaatactcaaat

SEQ ID NO: 742 - DNA, 51 bp, synthetic construct
  source 1..51: mol_type = other DNA
attccgacattggcggatggttggnnkaagtctaaggaatactcaaataac

SEQ ID NO: 743 - DNA, 51 bp, synthetic construct
  source 1..51: mol_type = other DNA
ccgacattggcggatggttggagtnnktctaaggaatactcaaataacgct

SEQ ID NO: 744 - DNA, 51 bp, synthetic construct
  source 1..51: mol_type = other DNA
acattggcggatggttggagtaagnnkaaggaatactcaaataacgctatt

SEQ ID NO: 745 - DNA, 51 bp, synthetic construct
  source 1..51: mol_type = other DNA
ttggcggatggttggagtaagtctnnkgaatactcaaataacgctattatc

SEQ ID NO: 746 - DNA, 51 bp, synthetic construct
  source 1..51: mol_type = other DNA
gcggatggttggagtaagtctaagnnktactcaaataacgctattatctta

SEQ ID NO: 747 - DNA, 51 bp, synthetic construct
  source 1..51: mol_type = other DNA
gatggttggagtaagtctaaggaannktcaaataacgctattatcttaatg

SEQ ID NO: 748 - DNA, 51 bp, synthetic construct
  source 1..51: mol_type = other DNA
ggttggagtaagtctaaggaatacnnkaataacgctattatcttaatgcgt

SEQ ID NO: 749 - DNA, 51 bp, synthetic construct
  source 1..51: mol_type = other DNA
tggagtaagtctaaggaatactcannkaacgctattatcttaatgcgtgac

SEQ ID NO: 750 - DNA, 51 bp, synthetic construct
  source 1..51: mol_type = other DNA
agtaagtctaaggaatactcaaatnnkgctattatcttaatgcgtgacaac

SEQ ID NO: 751 - DNA, 51 bp, synthetic construct
  source 1..51: mol_type = other DNA
aagtctaaggaatactcaaataacnnkattatcttaatgcgtgacaacctg

SEQ ID NO: 752 - DNA, 51 bp, synthetic construct
  source 1..51: mol_type = other DNA
tctaaggaatactcaaataacgctnnkatcttaatgcgtgacaacctgtat

SEQ ID NO: 753 - DNA, 51 bp, synthetic construct
  source 1..51: mol_type = other DNA
aaggaatactcaaataacgctattnnkttaatgcgtgacaacctgtattac

SEQ ID NO: 754 - DNA, 51 bp, synthetic construct
  source 1..51: mol_type = other DNA
gaatactcaaataacgctattatcnnkatgcgtgacaacctgtattacttg

SEQ ID NO: 755 - DNA, 51 bp, synthetic construct
  source 1..51: mol_type = other DNA
tactcaaataacgctattatcttannkcgtgacaacctgtattacttgggt

SEQ ID NO: 756 - DNA, 51 bp, synthetic construct
  source 1..51: mol_type = other DNA
tcaaataacgctattatcttaatgnnkgacaacctgtattacttgggtatt

SEQ ID NO: 757 - DNA, 51 bp, synthetic construct
  source 1..51: mol_type = other DNA
aataacgctattatcttaatgcgtnnkaacctgtattacttgggtattttc

SEQ ID NO: 758 - DNA, 51 bp, synthetic construct
  source 1..51: mol_type = other DNA
aacgctattatcttaatgcgtgacnnkctgtattacttgggtattttcaat

SEQ ID NO: 759 - DNA, 51 bp, synthetic construct
  source 1..51: mol_type = other DNA
gctattatcttaatgcgtgacaacnnktattacttgggtattttcaatgcc

SEQ ID NO: 760 - DNA, 51 bp, synthetic construct
  source 1..51: mol_type = other DNA
attatcttaatgcgtgacaacctgnnktacttgggtattttcaatgccaaa

SEQ ID NO: 761 - DNA, 51 bp, synthetic construct
  source 1..51: mol_type = other DNA
atcttaatgcgtgacaacctgtatnnkttgggtattttcaatgccaaaaat

SEQ ID NO: 762 - DNA, 51 bp, synthetic construct
  source 1..51: mol_type = other DNA
ttaatgcgtgacaacctgtattacnnkggtattttcaatgccaaaaataag

SEQ ID NO: 763 - DNA, 51 bp, synthetic construct
  source 1..51: mol_type = other DNA
atgcgtgacaacctgtattacttgnnkattttcaatgccaaaaataagccc

SEQ ID NO: 764 - DNA, 51 bp, synthetic construct
  source 1..51: mol_type = other DNA
cgtgacaacctgtattacttgggtnnkttcaatgccaaaaataagcccgat

SEQ ID NO: 765 - DNA, 51 bp, synthetic construct
  source 1..51: mol_type = other DNA
gacaacctgtattacttgggtattnnkaatgccaaaaataagcccgataaa

SEQ ID NO: 766 - DNA, 51 bp, synthetic construct
  source 1..51: mol_type = other DNA
aacctgtattacttgggtattttcnnkgccaaaaataagcccgataaaaaa

SEQ ID NO: 767 - DNA, 51 bp, synthetic construct
  source 1..51: mol_type = other DNA
ctgtattacttgggtattttcaatnnkaaaaataagcccgataaaaaaatc

SEQ ID NO: 768 - DNA, 51 bp, synthetic construct
  source 1..51: mol_type = other DNA
tattacttgggtattttcaatgccnnkaataagcccgataaaaaaatcatt

SEQ ID NO: 769 - DNA, 51 bp, synthetic construct
  source 1..51: mol_type = other DNA
tacttgggtattttcaatgccaaannkaagcccgataaaaaaatcattgaa

SEQ ID NO: 770 - DNA, 51 bp, synthetic construct
  source 1..51: mol_type = other DNA
ttgggtattttcaatgccaaaaatnnkcccgataaaaaaatcattgaaggg

SEQ ID NO: 771 - DNA, 51 bp, synthetic construct
  source 1..51: mol_type = other DNA
ggtattttcaatgccaaaaataagnnkgataaaaaaatcattgaagggaat

SEQ ID NO: 772 - DNA, 51 bp, synthetic construct
  source 1..51: mol_type = other DNA
attttcaatgccaaaaataagcccnnkaaaaaaatcattgaagggaatact

SEQ ID NO: 773 - DNA, 51 bp, synthetic construct
  source 1..51: mol_type = other DNA
ttcaatgccaaaaataagcccgatnnkaaaatcattgaagggaatacttca

SEQ ID NO: 774 - DNA, 51 bp, synthetic construct
  source 1..51: mol_type = other DNA
aatgccaaaaataagcccgataaannkatcattgaagggaatacttcagaa

SEQ ID NO: 775 - DNA, 51 bp, synthetic construct
  source 1..51: mol_type = other DNA
gccaaaaataagcccgataaaaaannkattgaagggaatacttcagaaaat

SEQ ID NO: 776 - DNA, 51 bp, synthetic construct
  source 1..51: mol_type = other DNA
aaaaataagcccgataaaaaaatcnnkgaagggaatacttcagaaaataag

SEQ ID NO: 777 - DNA, 51 bp, synthetic construct
  source 1..51: mol_type = other DNA
aataagcccgataaaaaaatcattnnkgggaatacttcagaaaataaggga

SEQ ID NO: 778 - DNA, 51 bp, synthetic construct
  source 1..51: mol_type = other DNA
aagcccgataaaaaaatcattgaannkaatacttcagaaaataagggagat

SEQ ID NO: 779 - DNA, 51 bp, synthetic construct
  source 1..51: mol_type = other DNA
cccgataaaaaaatcattgaagggnnkacttcagaaaataagggagattac

SEQ ID NO: 780 - DNA, 51 bp, synthetic construct
  source 1..51: mol_type = other DNA
gataaaaaaatcattgaagggaatnnktcagaaaataagggagattacaaa

SEQ ID NO: 781 - DNA, 51 bp, synthetic construct
  source 1..51: mol_type = other DNA
aaaaaaatcattgaagggaatactnnkgaaaataagggagattacaaaaaa

SEQ ID NO: 782 - DNA, 51 bp, synthetic construct
  source 1..51: mol_type = other DNA
aaaatcattgaagggaatacttcannkaataagggagattacaaaaaaatg

SEQ ID NO: 783 - DNA, 51 bp, synthetic construct
  source 1..51: mol_type = other DNA
atcattgaagggaatacttcagaannkaagggagattacaaaaaaatgatt

SEQ ID NO: 784 - DNA, 51 bp, synthetic construct
  source 1..51: mol_type = other DNA
attgaagggaatacttcagaaaatnnkggagattacaaaaaaatgatttat

SEQ ID NO: 785 - DNA, 51 bp, synthetic construct
  source 1..51: mol_type = other DNA
gaagggaatacttcagaaaataagnnkgattacaaaaaaatgatttataac

SEQ ID NO: 786 - DNA, 51 bp, synthetic construct
  source 1..51: mol_type = other DNA
gggaatacttcagaaaataagggannktacaaaaaaatgatttataacctt

SEQ ID NO: 787 - DNA, 51 bp, synthetic construct
  source 1..51: mol_type = other DNA
aatacttcagaaaataagggagatnnkaaaaaaatgatttataaccttttg

SEQ ID NO: 788 - DNA, 51 bp, synthetic construct
  source 1..51: mol_type = other DNA
acttcagaaaataagggagattacnnkaaaatgatttataaccttttgcca

SEQ ID NO: 789 - DNA, 51 bp, synthetic construct
  source 1..51: mol_type = other DNA
tcagaaaataagggagattacaaannkatgatttataaccttttgccaggc

SEQ ID NO: 790 - DNA, 51 bp, synthetic construct
  source 1..51: mol_type = other DNA
gaaaataagggagattacaaaaaannkatttataaccttttgccaggccca

SEQ ID NO: 791 - DNA, 51 bp, synthetic construct
  source 1..51: mol_type = other DNA
aataagggagattacaaaaaaatgnnktataaccttttgccaggcccaaac

SEQ ID NO: 792 - DNA, 51 bp, synthetic construct
  source 1..51: mol_type = other DNA
aagggagattacaaaaaaatgattnnkaaccttttgccaggcccaaacaaa

SEQ ID NO: 793 - DNA, 51 bp, synthetic construct
  source 1..51: mol_type = other DNA
ggagattacaaaaaaatgatttatnnkcttttgccaggcccaaacaaaatg

SEQ ID NO: 794 - DNA, 51 bp, synthetic construct
  source 1..51: mol_type = other DNA
gattacaaaaaaatgatttataacnnkttgccaggcccaaacaaaatgatc

SEQ ID NO: 795 - DNA, 51 bp, synthetic construct
  source 1..51: mol_type = other DNA
tacaaaaaaatgatttataaccttnnkccaggcccaaacaaaatgatcccc

SEQ ID NO: 796 - DNA, 51 bp, synthetic construct
  source 1..51: mol_type = other DNA
aaaaaaatgatttataaccttttgnnkggcccaaacaaaatgatccccaag

SEQ ID NO: 797 - DNA, 51 bp, synthetic construct
  source 1..51: mol_type = other DNA
aaaatgatttataaccttttgccannkccaaacaaaatgatccccaaggtg

SEQ ID NO: 798 - DNA, 51 bp, synthetic construct
  source 1..51: mol_type = other DNA
atgatttataaccttttgccaggcnnkaacaaaatgatccccaaggtgttt

SEQ ID NO: 799 - DNA, 51 bp, synthetic construct
  source 1..51: mol_type = other DNA
atttataaccttttgccaggcccannkaaaatgatccccaaggtgtttttg

SEQ ID NO: 800 - DNA, 51 bp, synthetic construct
  source 1..51: mol_type = other DNA
tataaccttttgccaggcccaaacnnkatgatccccaaggtgtttttgagt

SEQ ID NO: 801 - DNA, 51 bp, synthetic construct
  source 1..51: mol_type = other DNA
aaccttttgccaggcccaaacaaannkatccccaaggtgtttttgagtagt

SEQ ID NO: 802 - DNA, 51 bp, synthetic construct
  source 1..51: mol_type = other DNA
cttttgccaggcccaaacaaaatgnnkcccaaggtgtttttgagtagtaag

SEQ ID NO: 803 - DNA, 51 bp, synthetic construct
  source 1..51: mol_type = other DNA
ttgccaggcccaaacaaaatgatcnnkaaggtgtttttgagtagtaagacg

SEQ ID NO: 804 - DNA, 51 bp, synthetic construct
  source 1..51: mol_type = other DNA
ccaggcccaaacaaaatgatccccnnkgtgtttttgagtagtaagacggga

SEQ ID NO: 805 - DNA, 51 bp, synthetic construct
  source 1..51: mol_type = other DNA
ggcccaaacaaaatgatccccaagnnktttttgagtagtaagacgggagta

SEQ ID NO: 806 - DNA, 51 bp, synthetic construct
  source 1..51: mol_type = other DNA
ccaaacaaaatgatccccaaggtgnnkttgagtagtaagacgggagtagaa

SEQ ID NO: 807 - DNA, 51 bp, synthetic construct
  source 1..51: mol_type = other DNA
aacaaaatgatccccaaggtgtttnnkagtagtaagacgggagtagaaaca

SEQ ID NO: 808 - DNA, 51 bp, synthetic construct
  source 1..51: mol_type = other DNA
aaaatgatccccaaggtgtttttgnnkagtaagacgggagtagaaacatat

SEQ ID NO: 809 - DNA, 51 bp, synthetic construct
  source 1..51: mol_type = other DNA
atgatccccaaggtgtttttgagtnnkaagacgggagtagaaacatataag

SEQ ID NO: 810 - DNA, 51 bp, synthetic construct
  source 1..51: mol_type = other DNA
atccccaaggtgtttttgagtagtnnkacgggagtagaaacatataagcca

SEQ ID NO: 811 - DNA, 51 bp, synthetic construct
  source 1..51: mol_type = other DNA
cccaaggtgtttttgagtagtaagnnkggagtagaaacatataagccatca

SEQ ID NO: 812 - DNA, 51 bp, synthetic construct
  source 1..51: mol_type = other DNA
aaggtgtttttgagtagtaagacgnnkgtagaaacatataagccatcagcg

SEQ ID NO: 813 - DNA, 51 bp, synthetic construct
  source 1..51: mol_type = other DNA
gtgtttttgagtagtaagacgggannkgaaacatataagccatcagcgtac

SEQ ID NO: 814 - DNA, 51 bp, synthetic construct
  source 1..51: mol_type = other DNA
tttttgagtagtaagacgggagtannkacatataagccatcagcgtacatt

SEQ ID NO: 815 - DNA, 51 bp, synthetic construct
  source 1..51: mol_type = other DNA
ttgagtagtaagacgggagtagaannktataagccatcagcgtacattctt

SEQ ID NO: 816 - DNA, 51 bp, synthetic construct
  source 1..51: mol_type = other DNA
agtagtaagacgggagtagaaacannkaagccatcagcgtacattcttgaa

SEQ ID NO: 817 - DNA, 51 bp, synthetic construct
  source 1..51: mol_type = other DNA
agtaagacgggagtagaaacatatnnkccatcagcgtacattcttgaaggg

SEQ ID NO: 818 - DNA, 51 bp, synthetic construct
  source 1..51: mol_type = other DNA
aagacgggagtagaaacatataagnnktcagcgtacattcttgaagggtac

SEQ ID NO: 819 - DNA, 51 bp, synthetic construct
  source 1..51: mol_type = other DNA
acgggagtagaaacatataagccannkgcgtacattcttgaagggtacaaa

SEQ ID NO: 820 - DNA, 51 bp, synthetic construct
  source 1..51: mol_type = other DNA
ggagtagaaacatataagccatcannktacattcttgaagggtacaaacaa

SEQ ID NO: 821 - DNA, 51 bp, synthetic construct
  source 1..51: mol_type = other DNA
gtagaaacatataagccatcagcgnnkattcttgaagggtacaaacaaaat

SEQ ID NO: 822 - DNA, 51 bp, synthetic construct
  source 1..51: mol_type = other DNA
gaaacatataagccatcagcgtacnnkcttgaagggtacaaacaaaataaa

SEQ ID NO: 823 - DNA, 51 bp, synthetic construct
  source 1..51: mol_type = other DNA
acatataagccatcagcgtacattnnkgaagggtacaaacaaaataaacac

SEQ ID NO: 824 - DNA, 51 bp, synthetic construct
  source 1..51: mol_type = other DNA
tataagccatcagcgtacattcttnnkgggtacaaacaaaataaacacatc

SEQ ID NO: 825 - DNA, 51 bp, synthetic construct
  source 1..51: mol_type = other DNA
aagccatcagcgtacattcttgaannktacaaacaaaataaacacatcaag

SEQ ID NO: 826 - DNA, 51 bp, synthetic construct
  source 1..51: mol_type = other DNA
ccatcagcgtacattcttgaagggnnkaaacaaaataaacacatcaagagc

SEQ ID NO: 827 - DNA, 51 bp, synthetic construct
  source 1..51: mol_type = other DNA
tcagcgtacattcttgaagggtacnnkcaaaataaacacatcaagagcagc

SEQ ID NO: 828 - DNA, 51 bp, synthetic construct
  source 1..51: mol_type = other DNA
gcgtacattcttgaagggtacaaannkaataaacacatcaagagcagcaag

SEQ ID NO: 829 - DNA, 51 bp, synthetic construct
  source 1..51: mol_type = other DNA
tacattcttgaagggtacaaacaannkaaacacatcaagagcagcaaggac

SEQ ID NO: 830 - DNA, 51 bp, synthetic construct
  source 1..51: mol_type = other DNA
attcttgaagggtacaaacaaaatnnkcacatcaagagcagcaaggacttt

SEQ ID NO: 831 - DNA, 51 bp, synthetic construct
  source 1..51: mol_type = other DNA
cttgaagggtacaaacaaaataaannkatcaagagcagcaaggactttgac

SEQ ID NO: 832 - DNA, 51 bp, synthetic construct
  source 1..51: mol_type = other DNA
gaagggtacaaacaaaataaacacnnkaagagcagcaaggactttgacatt

SEQ ID NO: 833 - DNA, 51 bp, synthetic construct
  source 1..51: mol_type = other DNA
gggtacaaacaaaataaacacatcnnkagcagcaaggactttgacattaca

SEQ ID NO: 834 - DNA, 51 bp, synthetic construct
  source 1..51: mol_type = other DNA
tacaaacaaaataaacacatcaagnnkagcaaggactttgacattacattt

SEQ ID NO: 835 - DNA, 51 bp, synthetic construct
  source 1..51: mol_type = other DNA
aaacaaaataaacacatcaagagcnnkaaggactttgacattacattttgt

SEQ ID NO: 836 - DNA, 51 bp, synthetic construct
  source 1..51: mol_type = other DNA
caaaataaacacatcaagagcagcnnkgactttgacattacattttgtcat

SEQ ID NO: 837 - DNA, 51 bp, synthetic construct
  source 1..51: mol_type = other DNA
aataaacacatcaagagcagcaagnnktttgacattacattttgtcatgac

SEQ ID NO: 838 - DNA, 51 bp, synthetic construct
  source 1..51: mol_type = other DNA
aaacacatcaagagcagcaaggacnnkgacattacattttgtcatgactta

SEQ ID NO: 839 - DNA, 51 bp, synthetic construct
  source 1..51: mol_type = other DNA
cacatcaagagcagcaaggactttnnkattacattttgtcatgacttaatc

SEQ ID NO: 840 - DNA, 51 bp, synthetic construct
  source 1..51: mol_type = other DNA
atcaagagcagcaaggactttgacnnkacattttgtcatgacttaatcgac

SEQ ID NO: 841 - DNA, 51 bp, synthetic construct
  source 1..51: mol_type = other DNA
aagagcagcaaggactttgacattnnkttttgtcatgacttaatcgactac

SEQ ID NO: 842 - DNA, 51 bp, synthetic construct
  source 1..51: mol_type = other DNA
agcagcaaggactttgacattacannktgtcatgacttaatcgactacttt

SEQ ID NO: 843 - DNA, 51 bp, synthetic construct
  source 1..51: mol_type = other DNA
agcaaggactttgacattacatttnnkcatgacttaatcgactactttaaa

SEQ ID NO: 844 - DNA, 51 bp, synthetic construct
  source 1..51: mol_type = other DNA
aaggactttgacattacattttgtnnkgacttaatcgactactttaaaaat

SEQ ID NO: 845 - DNA, 51 bp, synthetic construct
  source 1..51: mol_type = other DNA
gactttgacattacattttgtcatnnkttaatcgactactttaaaaattgc

SEQ ID NO: 846 - DNA, 51 bp, synthetic construct
  source 1..51: mol_type = other DNA
tttgacattacattttgtcatgacnnkatcgactactttaaaaattgcatt

SEQ ID NO: 847 - DNA, 51 bp, synthetic construct
  source 1..51: mol_type = other DNA
gacattacattttgtcatgacttannkgactactttaaaaattgcattgcc

SEQ ID NO: 848 - DNA, 51 bp, synthetic construct
  source 1..51: mol_type = other DNA
attacattttgtcatgacttaatcnnktactttaaaaattgcattgccatt

SEQ ID NO: 849 - DNA, 51 bp, synthetic construct
  source 1..51: mol_type = other DNA
acattttgtcatgacttaatcgacnnktttaaaaattgcattgccattcac

SEQ ID NO: 850 - DNA, 51 bp, synthetic construct
  source 1..51: mol_type = other DNA
ttttgtcatgacttaatcgactacnnkaaaaattgcattgccattcaccct

SEQ ID NO: 851 - DNA, 51 bp, synthetic construct
  source 1..51: mol_type = other DNA
tgtcatgacttaatcgactactttnnkaattgcattgccattcaccctgag

SEQ ID NO: 852 - DNA, 51 bp, synthetic construct
  source 1..51: mol_type = other DNA
catgacttaatcgactactttaaannktgcattgccattcaccctgagtgg

SEQ ID NO: 853 - DNA, 51 bp, synthetic construct
  source 1..51: mol_type = other DNA
gacttaatcgactactttaaaaatnnkattgccattcaccctgagtggaaa

SEQ ID NO: 854 - DNA, 51 bp, synthetic construct
  source 1..51: mol_type = other DNA
ttaatcgactactttaaaaattgcnnkgccattcaccctgagtggaaaaat

SEQ ID NO: 855 - DNA, 51 bp, synthetic construct
  source 1..51: mol_type = other DNA
atcgactactttaaaaattgcattnnkattcaccctgagtggaaaaatttt

SEQ ID NO: 856 - DNA, 51 bp, synthetic construct
  source 1..51: mol_type = other DNA
gactactttaaaaattgcattgccnnkcaccctgagtggaaaaattttggt

SEQ ID NO: 857 - DNA, 51 bp, synthetic construct
  source 1..51: mol_type = other DNA
tactttaaaaattgcattgccattnnkcctgagtggaaaaattttggtttc

SEQ ID NO: 858 - DNA, 51 bp, synthetic construct
  source 1..51: mol_type = other DNA
tttaaaaattgcattgccattcacnnkgagtggaaaaattttggtttcgac

SEQ ID NO: 859 - DNA, 51 bp, synthetic construct
  source 1..51: mol_type = other DNA
aaaaattgcattgccattcaccctnnktggaaaaattttggtttcgacttc

SEQ ID NO: 860 - DNA, 51 bp, synthetic construct
  source 1..51: mol_type = other DNA
aattgcattgccattcaccctgagnnkaaaaattttggtttcgacttcagt

SEQ ID NO: 861 - DNA, 51 bp, synthetic construct
  source 1..51: mol_type = other DNA
tgcattgccattcaccctgagtggnnkaattttggtttcgacttcagtgat

SEQ ID NO: 862 - DNA, 51 bp, synthetic construct
  source 1..51: mol_type = other DNA
attgccattcaccctgagtggaaannktttggtttcgacttcagtgatacc

SEQ ID NO: 863 - DNA, 51 bp, synthetic construct
  source 1..51: mol_type = other DNA
gccattcaccctgagtggaaaaatnnkggtttcgacttcagtgatacctct

SEQ ID NO: 864 - DNA, 51 bp, synthetic construct
  source 1..51: mol_type = other DNA
attcaccctgagtggaaaaattttnnkttcgacttcagtgatacctctacc

SEQ ID NO: 865 - DNA, 51 bp, synthetic construct
  source 1..51: mol_type = other DNA
caccctgagtggaaaaattttggtnnkgacttcagtgatacctctacctat

SEQ ID NO: 866 - DNA, 51 bp, synthetic construct
  source 1..51: mol_type = other DNA
cctgagtggaaaaattttggtttcnnkttcagtgatacctctacctatgaa

SEQ ID NO: 867 - DNA, 51 bp, synthetic construct
  source 1..51: mol_type = other DNA
gagtggaaaaattttggtttcgacnnkagtgatacctctacctatgaagat

SEQ ID NO: 868 - DNA, 51 bp, synthetic construct
  source 1..51: mol_type = other DNA
tggaaaaattttggtttcgacttcnnkgatacctctacctatgaagatatc

SEQ ID NO: 869 - DNA, 51 bp, synthetic construct
  source 1..51: mol_type = other DNA
aaaaattttggtttcgacttcagtnnkacctctacctatgaagatatctct

SEQ ID NO: 870 - DNA, 51 bp, synthetic construct
  source 1..51: mol_type = other DNA
aattttggtttcgacttcagtgatnnktctacctatgaagatatctctggt

SEQ ID NO: 871 - DNA, 51 bp, synthetic construct
  source 1..51: mol_type = other DNA
tttggtttcgacttcagtgataccnnkacctatgaagatatctctggtttt

SEQ ID NO: 872 - DNA, 51 bp, synthetic construct
  source 1..51: mol_type = other DNA
ggtttcgacttcagtgatacctctnnktatgaagatatctctggtttttat

SEQ ID NO: 873 - DNA, 51 bp, synthetic construct
  source 1..51: mol_type = other DNA
ttcgacttcagtgatacctctaccnnkgaagatatctctggtttttatcgt

SEQ ID NO: 874 - DNA, 51 bp, synthetic construct
  source 1..51: mol_type = other DNA
gacttcagtgatacctctacctatnnkgatatctctggtttttatcgtgag

SEQ ID NO: 875 - DNA, 51 bp, synthetic construct
  source 1..51: mol_type = other DNA
ttcagtgatacctctacctatgaannkatctctggtttttatcgtgaggta

SEQ ID NO: 876 - DNA, 51 bp, synthetic construct
  source 1..51: mol_type = other DNA
agtgatacctctacctatgaagatnnktctggtttttatcgtgaggtagaa

SEQ ID NO: 877 - DNA, 51 bp, synthetic construct
  source 1..51: mol_type = other DNA
gatacctctacctatgaagatatcnnkggtttttatcgtgaggtagaactt

SEQ ID NO: 878 - DNA, 51 bp, synthetic construct
  source 1..51: mol_type = other DNA
acctctacctatgaagatatctctnnkttttatcgtgaggtagaacttcag

SEQ ID NO: 879 - DNA, 51 bp, synthetic construct
  source 1..51: mol_type = other DNA
tctacctatgaagatatctctggtnnktatcgtgaggtagaacttcagggt

SEQ ID NO: 880 - DNA, 51 bp, synthetic construct
  source 1..51: mol_type = other DNA
acctatgaagatatctctggttttnnkcgtgaggtagaacttcagggttac

SEQ ID NO: 881 - DNA, 51 bp, synthetic construct
  source 1..51: mol_type = other DNA
tatgaagatatctctggtttttatnnkgaggtagaacttcagggttacaag

SEQ ID NO: 882 - DNA, 51 bp, synthetic construct
  source 1..51: mol_type = other DNA
gaagatatctctggtttttatcgtnnkgtagaacttcagggttacaagatc

SEQ ID NO: 883 - DNA, 51 bp, synthetic construct
  source 1..51: mol_type = other DNA
gatatctctggtttttatcgtgagnnkgaacttcagggttacaagatcgat

SEQ ID NO: 884 - DNA, 51 bp, synthetic construct
  source 1..51: mol_type = other DNA
atctctggtttttatcgtgaggtannkcttcagggttacaagatcgattgg

SEQ ID NO: 885 - DNA, 51 bp, synthetic construct
  source 1..51: mol_type = other DNA
tctggtttttatcgtgaggtagaannkcagggttacaagatcgattggacg

SEQ ID NO: 886 - DNA, 51 bp, synthetic construct
  source 1..51: mol_type = other DNA
ggtttttatcgtgaggtagaacttnnkggttacaagatcgattggacgtac

SEQ ID NO: 887 - DNA, 51 bp, synthetic construct
  source 1..51: mol_type = other DNA
ttttatcgtgaggtagaacttcagnnktacaagatcgattggacgtacatt

SEQ ID NO: 888 - DNA, 51 bp, synthetic construct
  source 1..51: mol_type = other DNA
tatcgtgaggtagaacttcagggtnnkaagatcgattggacgtacatttcc

SEQ ID NO: 889 - DNA, 51 bp, synthetic construct
  source 1..51: mol_type = other DNA
cgtgaggtagaacttcagggttacnnkatcgattggacgtacatttccgag

SEQ ID NO: 890 - DNA, 51 bp, synthetic construct
  source 1..51: mol_type = other DNA
gaggtagaacttcagggttacaagnnkgattggacgtacatttccgagaaa

SEQ ID NO: 891 - DNA, 51 bp, synthetic construct
  source 1..51: mol_type = other DNA
gtagaacttcagggttacaagatcnnktggacgtacatttccgagaaagac

SEQ ID NO: 892 - DNA, 51 bp, synthetic construct
  source 1..51: mol_type = other DNA
gaacttcagggttacaagatcgatnnkacgtacatttccgagaaagacatt

SEQ ID NO: 893 - DNA, 51 bp, synthetic construct
  source 1..51: mol_type = other DNA
cttcagggttacaagatcgattggnnktacatttccgagaaagacattgat

SEQ ID NO: 894 - DNA, 51 bp, synthetic construct
  source 1..51: mol_type = other DNA
cagggttacaagatcgattggacgnnkatttccgagaaagacattgatctt

SEQ ID NO: 895 - DNA, 51 bp, synthetic construct
  source 1..51: mol_type = other DNA
ggttacaagatcgattggacgtacnnktccgagaaagacattgatctttta

SEQ ID NO: 896 - DNA, 51 bp, synthetic construct
  source 1..51: mol_type = other DNA
tacaagatcgattggacgtacattnnkgagaaagacattgatcttttacaa

SEQ ID NO: 897 - DNA, 51 bp, synthetic construct
  source 1..51: mol_type = other DNA
aagatcgattggacgtacatttccnnkaaagacattgatcttttacaagag

SEQ ID NO: 898 - DNA, 51 bp, synthetic construct
  source 1..51: mol_type = other DNA
atcgattggacgtacatttccgagnnkgacattgatcttttacaagagaag

SEQ ID NO: 899 - DNA, 51 bp, synthetic construct
  source 1..51: mol_type = other DNA
gattggacgtacatttccgagaaannkattgatcttttacaagagaagggt

SEQ ID NO: 900 - DNA, 51 bp, synthetic construct
  source 1..51: mol_type = other DNA
tggacgtacatttccgagaaagacnnkgatcttttacaagagaagggtcag

SEQ ID NO: 901 - DNA, 51 bp, synthetic construct
  source 1..51: mol_type = other DNA
acgtacatttccgagaaagacattnnkcttttacaagagaagggtcagctt

SEQ ID NO: 902 - DNA, 51 bp, synthetic construct
  source 1..51: mol_type = other DNA
tacatttccgagaaagacattgatnnkttacaagagaagggtcagctttac

SEQ ID NO: 903 - DNA, 51 bp, synthetic construct
  source 1..51: mol_type = other DNA
atttccgagaaagacattgatcttnnkcaagagaagggtcagctttactta

SEQ ID NO: 904 - DNA, 51 bp, synthetic construct
  source 1..51: mol_type = other DNA
tccgagaaagacattgatcttttannkgagaagggtcagctttacttattt

SEQ ID NO: 905 - DNA, 51 bp, synthetic construct
  source 1..51: mol_type = other DNA
gagaaagacattgatcttttacaannkaagggtcagctttacttatttcag

SEQ ID NO: 906 - DNA, 51 bp, synthetic construct
  source 1..51: mol_type = other DNA
aaagacattgatcttttacaagagnnkggtcagctttacttatttcagatc

SEQ ID NO: 907 - DNA, 51 bp, synthetic construct
  source 1..51: mol_type = other DNA
gacattgatcttttacaagagaagnnkcagctttacttatttcagatctac

SEQ ID NO: 908 - DNA, 51 bp, synthetic construct
  source 1..51: mol_type = other DNA
attgatcttttacaagagaagggtnnkctttacttatttcagatctacaat

SEQ ID NO: 909 - DNA, 51 bp, synthetic construct
  source 1..51: mol_type = other DNA
gatcttttacaagagaagggtcagnnktacttatttcagatctacaataaa

SEQ ID NO: 910 - DNA, 51 bp, synthetic construct
  source 1..51: mol_type = other DNA
cttttacaagagaagggtcagcttnnkttatttcagatctacaataaagac

SEQ ID NO: 911 - DNA, 51 bp, synthetic construct
  source 1..51: mol_type = other DNA
ttacaagagaagggtcagctttacnnktttcagatctacaataaagacttt

SEQ ID NO: 912 - DNA, 51 bp, synthetic construct
  source 1..51: mol_type = other DNA
caagagaagggtcagctttacttannkcagatctacaataaagacttttcg

SEQ ID NO: 913 - DNA, 51 bp, synthetic construct
  source 1..51: mol_type = other DNA
gagaagggtcagctttacttatttnnkatctacaataaagacttttcgaaa

SEQ ID NO: 914 - DNA, 51 bp, synthetic construct
  source 1..51: mol_type = other DNA
aagggtcagctttacttatttcagnnktacaataaagacttttcgaaaaaa

SEQ ID NO: 915 - DNA, 51 bp, synthetic construct
  source 1..51: mol_type = other DNA
ggtcagctttacttatttcagatcnnkaataaagacttttcgaaaaaatcc

SEQ ID NO: 916 - DNA, 51 bp, synthetic construct
  source 1..51: mol_type = other DNA
cagctttacttatttcagatctacnnkaaagacttttcgaaaaaatccacg

SEQ ID NO: 917 - DNA, 51 bp, synthetic construct
  source 1..51: mol_type = other DNA
ctttacttatttcagatctacaatnnkgacttttcgaaaaaatccacgggc

SEQ ID NO: 918 - DNA, 51 bp, synthetic construct
  source 1..51: mol_type = other DNA
tacttatttcagatctacaataaannkttttcgaaaaaatccacgggcaac

SEQ ID NO: 919 - DNA, 51 bp, synthetic construct
  source 1..51: mol_type = other DNA
ttatttcagatctacaataaagacnnktcgaaaaaatccacgggcaacgac

SEQ ID NO: 920 - DNA, 51 bp, synthetic construct
  source 1..51: mol_type = other DNA
tttcagatctacaataaagactttnnkaaaaaatccacgggcaacgacaac

SEQ ID NO: 921 - DNA, 51 bp, synthetic construct
  source 1..51: mol_type = other DNA
cagatctacaataaagacttttcgnnkaaatccacgggcaacgacaacctt

SEQ ID NO: 922 - DNA, 51 bp, synthetic construct
  source 1..51: mol_type = other DNA
atctacaataaagacttttcgaaannktccacgggcaacgacaaccttcat

SEQ ID NO: 923 - DNA, 51 bp, synthetic construct
  source 1..51: mol_type = other DNA
tacaataaagacttttcgaaaaaannkacgggcaacgacaaccttcataca

SEQ ID NO: 924 - DNA, 51 bp, synthetic construct
  source 1..51: mol_type = other DNA
aataaagacttttcgaaaaaatccnnkggcaacgacaaccttcatacaatg

SEQ ID NO: 925 - DNA, 51 bp, synthetic construct
  source 1..51: mol_type = other DNA
aaagacttttcgaaaaaatccacgnnkaacgacaaccttcatacaatgtac

SEQ ID NO: 926 - DNA, 51 bp, synthetic construct
  source 1..51: mol_type = other DNA
gacttttcgaaaaaatccacgggcnnkgacaaccttcatacaatgtactta

SEQ ID NO: 927 - DNA, 51 bp, synthetic construct
  source 1..51: mol_type = other DNA
ttttcgaaaaaatccacgggcaacnnkaaccttcatacaatgtacttaaag

SEQ ID NO: 928 - DNA, 51 bp, synthetic construct
  source 1..51: mol_type = other DNA
tcgaaaaaatccacgggcaacgacnnkcttcatacaatgtacttaaagaac

SEQ ID NO: 929 - DNA, 51 bp, synthetic construct
  source 1..51: mol_type = other DNA
aaaaaatccacgggcaacgacaacnnkcatacaatgtacttaaagaacctg

SEQ ID NO: 930 - DNA, 51 bp, synthetic construct
  source 1..51: mol_type = other DNA
aaatccacgggcaacgacaaccttnnkacaatgtacttaaagaacctgttc

SEQ ID NO: 931 - DNA, 51 bp, synthetic construct
  source 1..51: mol_type = other DNA
tccacgggcaacgacaaccttcatnnkatgtacttaaagaacctgttctct

SEQ ID NO: 932 - DNA, 51 bp, synthetic construct
  source 1..51: mol_type = other DNA
acgggcaacgacaaccttcatacannktacttaaagaacctgttctctgaa

SEQ ID NO: 933 - DNA, 51 bp, synthetic construct
  source 1..51: mol_type = other DNA
ggcaacgacaaccttcatacaatgnnkttaaagaacctgttctctgaagaa

SEQ ID NO: 934 - DNA, 51 bp, synthetic construct
  source 1..51: mol_type = other DNA
aacgacaaccttcatacaatgtacnnkaagaacctgttctctgaagaaaac

SEQ ID NO: 935 - DNA, 51 bp, synthetic construct
  source 1..51: mol_type = other DNA
gacaaccttcatacaatgtacttannkaacctgttctctgaagaaaacttg

SEQ ID NO: 936 - DNA, 51 bp, synthetic construct
  source 1..51: mol_type = other DNA
aaccttcatacaatgtacttaaagnnkctgttctctgaagaaaacttgaaa

SEQ ID NO: 937 - DNA, 51 bp, synthetic construct
  source 1..51: mol_type = other DNA
cttcatacaatgtacttaaagaacnnkttctctgaagaaaacttgaaagat

SEQ ID NO: 938 - DNA, 51 bp, synthetic construct
  source 1..51: mol_type = other DNA
catacaatgtacttaaagaacctgnnktctgaagaaaacttgaaagatatc

SEQ ID NO: 939 - DNA, 51 bp, synthetic construct
  source 1..51: mol_type = other DNA
acaatgtacttaaagaacctgttcnnkgaagaaaacttgaaagatatcgtg

SEQ ID NO: 940 - DNA, 51 bp, synthetic construct
  source 1..51: mol_type = other DNA
atgtacttaaagaacctgttctctnnkgaaaacttgaaagatatcgtgctt

SEQ ID NO: 941 - DNA, 51 bp, synthetic construct
  source 1..51: mol_type = other DNA
tacttaaagaacctgttctctgaannkaacttgaaagatatcgtgcttaaa

SEQ ID NO: 942 - DNA, 51 bp, synthetic construct
  source 1..51: mol_type = other DNA
ttaaagaacctgttctctgaagaannkttgaaagatatcgtgcttaaattg

SEQ ID NO: 943 - DNA, 51 bp, synthetic construct
  source 1..51: mol_type = other DNA
aagaacctgttctctgaagaaaacnnkaaagatatcgtgcttaaattgaat

SEQ ID NO: 944 - DNA, 51 bp, synthetic construct
  source 1..51: mol_type = other DNA
aacctgttctctgaagaaaacttgnnkgatatcgtgcttaaattgaatggc

SEQ ID NO: 945 - DNA, 51 bp, synthetic construct
  source 1..51: mol_type = other DNA
ctgttctctgaagaaaacttgaaannkatcgtgcttaaattgaatggcgag

SEQ ID NO: 946 - DNA, 51 bp, synthetic construct
  source 1..51: mol_type = other DNA
ttctctgaagaaaacttgaaagatnnkgtgcttaaattgaatggcgaggcc

SEQ ID NO: 947 - DNA, 51 bp, synthetic construct
  source 1..51: mol_type = other DNA
tctgaagaaaacttgaaagatatcnnkcttaaattgaatggcgaggccgag

SEQ ID NO: 948 - DNA, 51 bp, synthetic construct
  source 1..51: mol_type = other DNA
gaagaaaacttgaaagatatcgtgnnkaaattgaatggcgaggccgagatt

SEQ ID NO: 949 - DNA, 51 bp, synthetic construct
  source 1..51: mol_type = other DNA
gaaaacttgaaagatatcgtgcttnnkttgaatggcgaggccgagattttt

SEQ ID NO: 950 - DNA, 51 bp, synthetic construct
  source 1..51: mol_type = other DNA
aacttgaaagatatcgtgcttaaannkaatggcgaggccgagatttttttc

SEQ ID NO: 951 - DNA, 51 bp, synthetic construct
  source 1..51: mol_type = other DNA
ttgaaagatatcgtgcttaaattgnnkggcgaggccgagatttttttccgt

SEQ ID NO: 952 - DNA, 51 bp, synthetic construct
  source 1..51: mol_type = other DNA
aaagatatcgtgcttaaattgaatnnkgaggccgagatttttttccgtaaa

SEQ ID NO: 953 - DNA, 51 bp, synthetic construct
  source 1..51: mol_type = other DNA
gatatcgtgcttaaattgaatggcnnkgccgagatttttttccgtaaaagc

SEQ ID NO: 954 - DNA, 51 bp, synthetic construct
  source 1..51: mol_type = other DNA
atcgtgcttaaattgaatggcgagnnkgagatttttttccgtaaaagctcg

SEQ ID NO: 955 - DNA, 51 bp, synthetic construct
  source 1..51: mol_type = other DNA
gtgcttaaattgaatggcgaggccnnkatttttttccgtaaaagctcgatt

SEQ ID NO: 956 - DNA, 51 bp, synthetic construct
  source 1..51: mol_type = other DNA
cttaaattgaatggcgaggccgagnnktttttccgtaaaagctcgattaag

SEQ ID NO: 957 - DNA, 51 bp, synthetic construct
  source 1..51: mol_type = other DNA
aaattgaatggcgaggccgagattnnkttccgtaaaagctcgattaagaat

SEQ ID NO: 958 - DNA, 51 bp, synthetic construct
  source 1..51: mol_type = other DNA
ttgaatggcgaggccgagatttttnnkcgtaaaagctcgattaagaatccc

SEQ ID NO: 959 - DNA, 51 bp, synthetic construct
  source 1..51: mol_type = other DNA
aatggcgaggccgagatttttttcnnkaaaagctcgattaagaatcccatc

SEQ ID NO: 960 - DNA, 51 bp, synthetic construct
  source 1..51: mol_type = other DNA
ggcgaggccgagatttttttccgtnnkagctcgattaagaatcccatcatc

SEQ ID NO: 961 - DNA, 51 bp, synthetic construct
  source 1..51: mol_type = other DNA
gaggccgagatttttttccgtaaannktcgattaagaatcccatcatccac

SEQ ID NO: 962 - DNA, 51 bp, synthetic construct
  source 1..51: mol_type = other DNA
gccgagatttttttccgtaaaagcnnkattaagaatcccatcatccacaag

SEQ ID NO: 963 - DNA, 51 bp, synthetic construct
  source 1..51: mol_type = other DNA
gagatttttttccgtaaaagctcgnnkaagaatcccatcatccacaagaaa

SEQ ID NO: 964 - DNA, 51 bp, synthetic construct
  source 1..51: mol_type = other DNA
atttttttccgtaaaagctcgattnnkaatcccatcatccacaagaaaggc

SEQ ID NO: 965 - DNA, 51 bp, synthetic construct
  source 1..51: mol_type = other DNA
tttttccgtaaaagctcgattaagnnkcccatcatccacaagaaaggcagc

SEQ ID NO: 966 - DNA, 51 bp, synthetic construct
  source 1..51: mol_type = other DNA
ttccgtaaaagctcgattaagaatnnkatcatccacaagaaaggcagcatt

SEQ ID NO: 967 - DNA, 51 bp, synthetic construct
  source 1..51: mol_type = other DNA
cgtaaaagctcgattaagaatcccnnkatccacaagaaaggcagcattctg

SEQ ID NO: 968 - DNA, 51 bp, synthetic construct
  source 1..51: mol_type = other DNA
aaaagctcgattaagaatcccatcnnkcacaagaaaggcagcattctggta

SEQ ID NO: 969 - DNA, 51 bp, synthetic construct
  source 1..51: mol_type = other DNA
agctcgattaagaatcccatcatcnnkaagaaaggcagcattctggtaaat

SEQ ID NO: 970 - DNA, 51 bp, synthetic construct
  source 1..51: mol_type = other DNA
tcgattaagaatcccatcatccacnnkaaaggcagcattctggtaaatcgt

SEQ ID NO: 971 - DNA, 51 bp, synthetic construct
  source 1..51: mol_type = other DNA
attaagaatcccatcatccacaagnnkggcagcattctggtaaatcgtacc

SEQ ID NO: 972 - DNA, 51 bp, synthetic construct
  source 1..51: mol_type = other DNA
aagaatcccatcatccacaagaaannkagcattctggtaaatcgtacctat

SEQ ID NO: 973 - DNA, 51 bp, synthetic construct
  source 1..51: mol_type = other DNA
aatcccatcatccacaagaaaggcnnkattctggtaaatcgtacctatgaa

SEQ ID NO: 974 - DNA, 51 bp, synthetic construct
  source 1..51: mol_type = other DNA
cccatcatccacaagaaaggcagcnnkctggtaaatcgtacctatgaagcg

SEQ ID NO: 975 - DNA, 51 bp, synthetic construct
  source 1..51: mol_type = other DNA
atcatccacaagaaaggcagcattnnkgtaaatcgtacctatgaagcggag

SEQ ID NO: 976 - DNA, 51 bp, synthetic construct
  source 1..51: mol_type = other DNA
atccacaagaaaggcagcattctgnnkaatcgtacctatgaagcggaggaa

SEQ ID NO: 977 - DNA, 51 bp, synthetic construct
  source 1..51: mol_type = other DNA
cacaagaaaggcagcattctggtannkcgtacctatgaagcggaggaaaag

SEQ ID NO: 978 - DNA, 51 bp, synthetic construct
  source 1..51: mol_type = other DNA
aagaaaggcagcattctggtaaatnnkacctatgaagcggaggaaaaggac

SEQ ID NO: 979 - DNA, 51 bp, synthetic construct
  source 1..51: mol_type = other DNA
aaaggcagcattctggtaaatcgtnnktatgaagcggaggaaaaggaccaa

SEQ ID NO: 980 - DNA, 51 bp, synthetic construct
  source 1..51: mol_type = other DNA
ggcagcattctggtaaatcgtaccnnkgaagcggaggaaaaggaccaattt

SEQ ID NO: 981 - DNA, 51 bp, synthetic construct
  source 1..51: mol_type = other DNA
agcattctggtaaatcgtacctatnnkgcggaggaaaaggaccaatttggt

SEQ ID NO: 982 - DNA, 51 bp, synthetic construct
  source 1..51: mol_type = other DNA
attctggtaaatcgtacctatgaannkgaggaaaaggaccaatttggtaat

SEQ ID NO: 983 - DNA, 51 bp, synthetic construct
  source 1..51: mol_type = other DNA
ctggtaaatcgtacctatgaagcgnnkgaaaaggaccaatttggtaatatt

SEQ ID NO: 984 - DNA, 51 bp, synthetic construct
  source 1..51: mol_type = other DNA
gtaaatcgtacctatgaagcggagnnkaaggaccaatttggtaatattcag

SEQ ID NO: 985 - DNA, 51 bp, synthetic construct
  source 1..51: mol_type = other DNA
aatcgtacctatgaagcggaggaannkgaccaatttggtaatattcagatt

SEQ ID NO: 986 - DNA, 51 bp, synthetic construct
  source 1..51: mol_type = other DNA
cgtacctatgaagcggaggaaaagnnkcaatttggtaatattcagattgtc

SEQ ID NO: 987 - DNA, 51 bp, synthetic construct
  source 1..51: mol_type = other DNA
acctatgaagcggaggaaaaggacnnktttggtaatattcagattgtccgt

SEQ ID NO: 988 - DNA, 51 bp, synthetic construct
  source 1..51: mol_type = other DNA
tatgaagcggaggaaaaggaccaannkggtaatattcagattgtccgtaag

SEQ ID NO: 989 - DNA, 51 bp, synthetic construct
  source 1..51: mol_type = other DNA
gaagcggaggaaaaggaccaatttnnkaatattcagattgtccgtaagaac

SEQ ID NO: 990 - DNA, 51 bp, synthetic construct
  source 1..51: mol_type = other DNA
gcggaggaaaaggaccaatttggtnnkattcagattgtccgtaagaacatc

SEQ ID NO: 991 - DNA, 51 bp, synthetic construct
  source 1..51: mol_type = other DNA
gaggaaaaggaccaatttggtaatnnkcagattgtccgtaagaacatccct

SEQ ID NO: 992 - DNA, 51 bp, synthetic construct
  source 1..51: mol_type = other DNA
gaaaaggaccaatttggtaatattnnkattgtccgtaagaacatccctgaa

SEQ ID NO: 993 - DNA, 51 bp, synthetic construct
  source 1..51: mol_type = other DNA
aaggaccaatttggtaatattcagnnkgtccgtaagaacatccctgaaaat

SEQ ID NO: 994 - DNA, 51 bp, synthetic construct
  source 1..51: mol_type = other DNA
gaccaatttggtaatattcagattnnkcgtaagaacatccctgaaaatatc

SEQ ID NO: 995 - DNA, 51 bp, synthetic construct
  source 1..51: mol_type = other DNA
caatttggtaatattcagattgtcnnkaagaacatccctgaaaatatctat

SEQ ID NO: 996 - DNA, 51 bp, synthetic construct
  source 1..51: mol_type = other DNA
tttggtaatattcagattgtccgtnnkaacatccctgaaaatatctatcaa

SEQ ID NO: 997 - DNA, 51 bp, synthetic construct
  source 1..51: mol_type = other DNA
ggtaatattcagattgtccgtaagnnkatccctgaaaatatctatcaagaa

SEQ ID NO: 998 - DNA, 51 bp, synthetic construct
  source 1..51: mol_type = other DNA
aatattcagattgtccgtaagaacnnkcctgaaaatatctatcaagaatta

SEQ ID NO: 999 - DNA, 51 bp, synthetic construct
  source 1..51: mol_type = other DNA
attcagattgtccgtaagaacatcnnkgaaaatatctatcaagaattatat

SEQ ID NO: 1000 - DNA, 51 bp, synthetic construct
  source 1..51: mol_type = other DNA
cagattgtccgtaagaacatccctnnkaatatctatcaagaattatataaa

SEQ ID NO: 1001 - DNA, 51 bp, synthetic construct
  source 1..51: mol_type = other DNA
attgtccgtaagaacatccctgaannkatctatcaagaattatataaatat

SEQ ID NO: 1002 - DNA, 51 bp, synthetic construct
  source 1..51: mol_type = other DNA
gtccgtaagaacatccctgaaaatnnktatcaagaattatataaatatttc

SEQ ID NO: 1003 - DNA, 51 bp, synthetic construct
  source 1..51: mol_type = other DNA
cgtaagaacatccctgaaaatatcnnkcaagaattatataaatatttcaac

SEQ ID NO: 1004 - DNA, 51 bp, synthetic construct
  source 1..51: mol_type = other DNA
aagaacatccctgaaaatatctatnnkgaattatataaatatttcaacgat

SEQ ID NO: 1005 - DNA, 51 bp, synthetic construct
  source 1..51: mol_type = other DNA
aacatccctgaaaatatctatcaannkttatataaatatttcaacgataag

SEQ ID NO: 1006 - DNA, 51 bp, synthetic construct
  source 1..51: mol_type = other DNA
atccctgaaaatatctatcaagaannktataaatatttcaacgataagtcg

SEQ ID NO: 1007 - DNA, 51 bp, synthetic construct
  source 1..51: mol_type = other DNA
cctgaaaatatctatcaagaattannkaaatatttcaacgataagtcggac

SEQ ID NO: 1008 - DNA, 51 bp, synthetic construct
  source 1..51: mol_type = other DNA
gaaaatatctatcaagaattatatnnktatttcaacgataagtcggacaag

SEQ ID NO: 1009 - DNA, 51 bp, synthetic construct
  source 1..51: mol_type = other DNA
aatatctatcaagaattatataaannkttcaacgataagtcggacaaggaa

SEQ ID NO: 1010 - DNA, 51 bp, synthetic construct
  source 1..51: mol_type = other DNA
atctatcaagaattatataaatatnnkaacgataagtcggacaaggaactt

SEQ ID NO: 1011 - DNA, 51 bp, synthetic construct
  source 1..51: mol_type = other DNA
tatcaagaattatataaatatttcnnkgataagtcggacaaggaacttagc

SEQ ID NO: 1012 - DNA, 51 bp, synthetic construct
  source 1..51: mol_type = other DNA
caagaattatataaatatttcaacnnkaagtcggacaaggaacttagcgat

SEQ ID NO: 1013 - DNA, 51 bp, synthetic construct
  source 1..51: mol_type = other DNA
gaattatataaatatttcaacgatnnktcggacaaggaacttagcgatgaa

SEQ ID NO: 1014 - DNA, 51 bp, synthetic construct
  source 1..51: mol_type = other DNA
ttatataaatatttcaacgataagnnkgacaaggaacttagcgatgaagcc

SEQ ID NO: 1015 - DNA, 51 bp, synthetic construct
  source 1..51: mol_type = other DNA
tataaatatttcaacgataagtcgnnkaaggaacttagcgatgaagccgcg

SEQ ID NO: 1016 - DNA, 51 bp, synthetic construct
  source 1..51: mol_type = other DNA
aaatatttcaacgataagtcggacnnkgaacttagcgatgaagccgcgaag

SEQ ID NO: 1017 - DNA, 51 bp, synthetic construct
  source 1..51: mol_type = other DNA
tatttcaacgataagtcggacaagnnkcttagcgatgaagccgcgaagttg

SEQ ID NO: 1018 - DNA, 51 bp, synthetic construct
  source 1..51: mol_type = other DNA
ttcaacgataagtcggacaaggaannkagcgatgaagccgcgaagttgaaa

SEQ ID NO: 1019 - DNA, 51 bp, synthetic construct
  source 1..51: mol_type = other DNA
aacgataagtcggacaaggaacttnnkgatgaagccgcgaagttgaaaaat

SEQ ID NO: 1020 - DNA, 51 bp, synthetic construct
  source 1..51: mol_type = other DNA
gataagtcggacaaggaacttagcnnkgaagccgcgaagttgaaaaatgtt

SEQ ID NO: 1021 - DNA, 51 bp, synthetic construct
  source 1..51: mol_type = other DNA
aagtcggacaaggaacttagcgatnnkgccgcgaagttgaaaaatgttgtt

SEQ ID NO: 1022 - DNA, 51 bp, synthetic construct
  source 1..51: mol_type = other DNA
tcggacaaggaacttagcgatgaannkgcgaagttgaaaaatgttgttggt

SEQ ID NO: 1023 - DNA, 51 bp, synthetic construct
  source 1..51: mol_type = other DNA
gacaaggaacttagcgatgaagccnnkaagttgaaaaatgttgttggtcac

SEQ ID NO: 1024 - DNA, 51 bp, synthetic construct
  source 1..51: mol_type = other DNA
aaggaacttagcgatgaagccgcgnnkttgaaaaatgttgttggtcaccac

SEQ ID NO: 1025 - DNA, 51 bp, synthetic construct
  source 1..51: mol_type = other DNA
gaacttagcgatgaagccgcgaagnnkaaaaatgttgttggtcaccacgaa

SEQ ID NO: 1026 - DNA, 51 bp, synthetic construct
  source 1..51: mol_type = other DNA
cttagcgatgaagccgcgaagttgnnkaatgttgttggtcaccacgaagca

SEQ ID NO: 1027 - DNA, 51 bp, synthetic construct
  source 1..51: mol_type = other DNA
agcgatgaagccgcgaagttgaaannkgttgttggtcaccacgaagcagca

SEQ ID NO: 1028 - DNA, 51 bp, synthetic construct
  source 1..51: mol_type = other DNA
gatgaagccgcgaagttgaaaaatnnkgttggtcaccacgaagcagcaaca

SEQ ID NO: 1029 - DNA, 51 bp, synthetic construct
  source 1..51: mol_type = other DNA
gaagccgcgaagttgaaaaatgttnnkggtcaccacgaagcagcaacaaac

SEQ ID NO: 1030 - DNA, 51 bp, synthetic construct
  source 1..51: mol_type = other DNA
gccgcgaagttgaaaaatgttgttnnkcaccacgaagcagcaacaaacatt

SEQ ID NO: 1031 - DNA, 51 bp, synthetic construct
  source 1..51: mol_type = other DNA
gcgaagttgaaaaatgttgttggtnnkcacgaagcagcaacaaacattgtg

SEQ ID NO: 1032 - DNA, 51 bp, synthetic construct
  source 1..51: mol_type = other DNA
aagttgaaaaatgttgttggtcacnnkgaagcagcaacaaacattgtgaaa

SEQ ID NO: 1033 - DNA, 51 bp, synthetic construct
  source 1..51: mol_type = other DNA
ttgaaaaatgttgttggtcaccacnnkgcagcaacaaacattgtgaaagac

SEQ ID NO: 1034 - DNA, 51 bp, synthetic construct
  source 1..51: mol_type = other DNA
aaaaatgttgttggtcaccacgaannkgcaacaaacattgtgaaagactat

SEQ ID NO: 1035 - DNA, 51 bp, synthetic construct
  source 1..51: mol_type = other DNA
aatgttgttggtcaccacgaagcannkacaaacattgtgaaagactatcgc

SEQ ID NO: 1036 - DNA, 51 bp, synthetic construct
  source 1..51: mol_type = other DNA
gttgttggtcaccacgaagcagcannkaacattgtgaaagactatcgctac

SEQ ID NO: 1037 - DNA, 51 bp, synthetic construct
  source 1..51: mol_type = other DNA
gttggtcaccacgaagcagcaacannkattgtgaaagactatcgctacact

SEQ ID NO: 1038 - DNA, 51 bp, synthetic construct
  source 1..51: mol_type = other DNA
ggtcaccacgaagcagcaacaaacnnkgtgaaagactatcgctacacttac

SEQ ID NO: 1039 - DNA, 51 bp, synthetic construct
  source 1..51: mol_type = other DNA
caccacgaagcagcaacaaacattnnkaaagactatcgctacacttacgat

SEQ ID NO: 1040 - DNA, 51 bp, synthetic construct
  source 1..51: mol_type = other DNA
cacgaagcagcaacaaacattgtgnnkgactatcgctacacttacgataag

SEQ ID NO: 1041 - DNA, 51 bp, synthetic construct
  source 1..51: mol_type = other DNA
gaagcagcaacaaacattgtgaaannktatcgctacacttacgataagtac

SEQ ID NO: 1042 - DNA, 51 bp, synthetic construct
  source 1..51: mol_type = other DNA
gcagcaacaaacattgtgaaagacnnkcgctacacttacgataagtacttt

SEQ ID NO: 1043 - DNA, 51 bp, synthetic construct
  source 1..51: mol_type = other DNA
gcaacaaacattgtgaaagactatnnktacacttacgataagtacttttta

SEQ ID NO: 1044 - DNA, 51 bp, synthetic construct
  source 1..51: mol_type = other DNA
acaaacattgtgaaagactatcgcnnkacttacgataagtactttttacat

SEQ ID NO: 1045 - DNA, 51 bp, synthetic construct
  source 1..51: mol_type = other DNA
aacattgtgaaagactatcgctacnnktacgataagtactttttacatatg

SEQ ID NO: 1046 - DNA, 51 bp, synthetic construct
  source 1..51: mol_type = other DNA
attgtgaaagactatcgctacactnnkgataagtactttttacatatgcct

SEQ ID NO: 1047 - DNA, 51 bp, synthetic construct
  source 1..51: mol_type = other DNA
gtgaaagactatcgctacacttacnnkaagtactttttacatatgcctatt

SEQ ID NO: 1048 - DNA, 51 bp, synthetic construct
  source 1..51: mol_type = other DNA
aaagactatcgctacacttacgatnnktactttttacatatgcctattacg

SEQ ID NO: 1049 - DNA, 51 bp, synthetic construct
  source 1..51: mol_type = other DNA
gactatcgctacacttacgataagnnktttttacatatgcctattacgatt

SEQ ID NO: 1050 - DNA, 51 bp, synthetic construct
  source 1..51: mol_type = other DNA
tatcgctacacttacgataagtacnnkttacatatgcctattacgattaac

SEQ ID NO: 1051 - DNA, 51 bp, synthetic construct
  source 1..51: mol_type = other DNA
cgctacacttacgataagtactttnnkcatatgcctattacgattaacttt

SEQ ID NO: 1052 - DNA, 51 bp, synthetic construct
  source 1..51: mol_type = other DNA
tacacttacgataagtactttttannkatgcctattacgattaactttaag

SEQ ID NO: 1053 - DNA, 51 bp, synthetic construct
  source 1..51: mol_type = other DNA
acttacgataagtactttttacatnnkcctattacgattaactttaaggca

SEQ ID NO: 1054 - DNA, 51 bp, synthetic construct
  source 1..51: mol_type = other DNA
tacgataagtactttttacatatgnnkattacgattaactttaaggcaaat

SEQ ID NO: 1055 - DNA, 51 bp, synthetic construct
  source 1..51: mol_type = other DNA
gataagtactttttacatatgcctnnkacgattaactttaaggcaaataag

SEQ ID NO: 1056 - DNA, 51 bp, synthetic construct
  source 1..51: mol_type = other DNA
aagtactttttacatatgcctattnnkattaactttaaggcaaataagaca

SEQ ID NO: 1057 - DNA, 51 bp, synthetic construct
  source 1..51: mol_type = other DNA
tactttttacatatgcctattacgnnkaactttaaggcaaataagacaggt

SEQ ID NO: 1058 - DNA, 51 bp, synthetic construct
  source 1..51: mol_type = other DNA
tttttacatatgcctattacgattnnktttaaggcaaataagacaggtttt

SEQ ID NO: 1059 - DNA, 51 bp, synthetic construct
  source 1..51: mol_type = other DNA
ttacatatgcctattacgattaacnnkaaggcaaataagacaggttttatc

SEQ ID NO: 1060 - DNA, 51 bp, synthetic construct
  source 1..51: mol_type = other DNA
catatgcctattacgattaactttnnkgcaaataagacaggttttatcaac

SEQ ID NO: 1061 - DNA, 51 bp, synthetic construct
  source 1..51: mol_type = other DNA
atgcctattacgattaactttaagnnkaataagacaggttttatcaacgac

SEQ ID NO: 1062 - DNA, 51 bp, synthetic construct
  source 1..51: mol_type = other DNA
cctattacgattaactttaaggcannkaagacaggttttatcaacgaccgt

SEQ ID NO: 1063 - DNA, 51 bp, synthetic construct
  source 1..51: mol_type = other DNA
attacgattaactttaaggcaaatnnkacaggttttatcaacgaccgtatc

SEQ ID NO: 1064 - DNA, 51 bp, synthetic construct
  source 1..51: mol_type = other DNA
acgattaactttaaggcaaataagnnkggttttatcaacgaccgtatcctg

SEQ ID NO: 1065 - DNA, 51 bp, synthetic construct
  source 1..51: mol_type = other DNA
attaactttaaggcaaataagacannktttatcaacgaccgtatcctgcaa

SEQ ID NO: 1066 - DNA, 51 bp, synthetic construct
  source 1..51: mol_type = other DNA
aactttaaggcaaataagacaggtnnkatcaacgaccgtatcctgcaatat

SEQ ID NO: 1067 - DNA, 51 bp, synthetic construct
  source 1..51: mol_type = other DNA
tttaaggcaaataagacaggttttnnkaacgaccgtatcctgcaatatatt

SEQ ID NO: 1068 - DNA, 51 bp, synthetic construct
  source 1..51: mol_type = other DNA
aaggcaaataagacaggttttatcnnkgaccgtatcctgcaatatattgca

SEQ ID NO: 1069 - DNA, 51 bp, synthetic construct
  source 1..51: mol_type = other DNA
gcaaataagacaggttttatcaacnnkcgtatcctgcaatatattgcaaaa

SEQ ID NO: 1070 - DNA, 51 bp, synthetic construct
  source 1..51: mol_type = other DNA
aataagacaggttttatcaacgacnnkatcctgcaatatattgcaaaagag

SEQ ID NO: 1071 - DNA, 51 bp, synthetic construct
  source 1..51: mol_type = other DNA
aagacaggttttatcaacgaccgtnnkctgcaatatattgcaaaagagaag

SEQ ID NO: 1072 - DNA, 51 bp, synthetic construct
  source 1..51: mol_type = other DNA
acaggttttatcaacgaccgtatcnnkcaatatattgcaaaagagaaggac

SEQ ID NO: 1073 - DNA, 51 bp, synthetic construct
  source 1..51: mol_type = other DNA
ggttttatcaacgaccgtatcctgnnktatattgcaaaagagaaggacctg

SEQ ID NO: 1074 - DNA, 51 bp, synthetic construct
  source 1..51: mol_type = other DNA
tttatcaacgaccgtatcctgcaannkattgcaaaagagaaggacctgcat

SEQ ID NO: 1075 - DNA, 51 bp, synthetic construct
  source 1..51: mol_type = other DNA
atcaacgaccgtatcctgcaatatnnkgcaaaagagaaggacctgcatgtc

SEQ ID NO: 1076 - DNA, 51 bp, synthetic construct
  source 1..51: mol_type = other DNA
aacgaccgtatcctgcaatatattnnkaaagagaaggacctgcatgtcatt

SEQ ID NO: 1077 - DNA, 51 bp, synthetic construct
  source 1..51: mol_type = other DNA
gaccgtatcctgcaatatattgcannkgagaaggacctgcatgtcattggg

SEQ ID NO: 1078 - DNA, 51 bp, synthetic construct
  source 1..51: mol_type = other DNA
cgtatcctgcaatatattgcaaaannkaaggacctgcatgtcattgggatt

SEQ ID NO: 1079 - DNA, 51 bp, synthetic construct
  source 1..51: mol_type = other DNA
atcctgcaatatattgcaaaagagnnkgacctgcatgtcattgggattgat

SEQ ID NO: 1080 - DNA, 51 bp, synthetic construct
  source 1..51: mol_type = other DNA
ctgcaatatattgcaaaagagaagnnkctgcatgtcattgggattgatcgc

SEQ ID NO: 1081 - DNA, 51 bp, synthetic construct
  source 1..51: mol_type = other DNA
caatatattgcaaaagagaaggacnnkcatgtcattgggattgatcgcggt

SEQ ID NO: 1082 - DNA, 51 bp, synthetic construct
  source 1..51: mol_type = other DNA
tatattgcaaaagagaaggacctgnnkgtcattgggattgatcgcggtgaa

SEQ ID NO: 1083 - DNA, 51 bp, synthetic construct
  source 1..51: mol_type = other DNA
attgcaaaagagaaggacctgcatnnkattgggattgatcgcggtgaacgc

SEQ ID NO: 1084 - DNA, 51 bp, synthetic construct
  source 1..51: mol_type = other DNA
gcaaaagagaaggacctgcatgtcnnkgggattgatcgcggtgaacgcaat

SEQ ID NO: 1085 - DNA, 51 bp, synthetic construct
  source 1..51: mol_type = other DNA
aaagagaaggacctgcatgtcattnnkattgatcgcggtgaacgcaatctg

SEQ ID NO: 1086 - DNA, 51 bp, synthetic construct
  source 1..51: mol_type = other DNA
gagaaggacctgcatgtcattgggnnkgatcgcggtgaacgcaatctgatt

SEQ ID NO: 1087 - DNA, 51 bp, synthetic construct
  source 1..51: mol_type = other DNA
aaggacctgcatgtcattgggattnnkcgcggtgaacgcaatctgatttac

SEQ ID NO: 1088 - DNA, 51 bp, synthetic construct
  source 1..51: mol_type = other DNA
gacctgcatgtcattgggattgatnnkggtgaacgcaatctgatttacgtg

SEQ ID NO: 1089 - DNA, 51 bp, synthetic construct
  source 1..51: mol_type = other DNA
ctgcatgtcattgggattgatcgcnnkgaacgcaatctgatttacgtgagt

SEQ ID NO: 1090 - DNA, 51 bp, synthetic construct
  source 1..51: mol_type = other DNA
catgtcattgggattgatcgcggtnnkcgcaatctgatttacgtgagtgtt

SEQ ID NO: 1091 - DNA, 51 bp, synthetic construct
  source 1..51: mol_type = other DNA
gtcattgggattgatcgcggtgaannkaatctgatttacgtgagtgttatt

SEQ ID NO: 1092 - DNA, 51 bp, synthetic construct
  source 1..51: mol_type = other DNA
attgggattgatcgcggtgaacgcnnkctgatttacgtgagtgttattgat

SEQ ID NO: 1093 - DNA, 51 bp, synthetic construct
  source 1..51: mol_type = other DNA
gggattgatcgcggtgaacgcaatnnkatttacgtgagtgttattgatacc

SEQ ID NO: 1094 - DNA, 51 bp, synthetic construct
  source 1..51: mol_type = other DNA
attgatcgcggtgaacgcaatctgnnktacgtgagtgttattgatacctgc

SEQ ID NO: 1095 - DNA, 51 bp, synthetic construct
  source 1..51: mol_type = other DNA
gatcgcggtgaacgcaatctgattnnkgtgagtgttattgatacctgcggt

SEQ ID NO: 1096 - DNA, 51 bp, synthetic construct
  source 1..51: mol_type = other DNA
cgcggtgaacgcaatctgatttacnnkagtgttattgatacctgcggtaat

SEQ ID NO: 1097 - DNA, 51 bp, synthetic construct
  source 1..51: mol_type = other DNA
ggtgaacgcaatctgatttacgtgnnkgttattgatacctgcggtaatatt

SEQ ID NO: 1098 - DNA, 51 bp, synthetic construct
  source 1..51: mol_type = other DNA
gaacgcaatctgatttacgtgagtnnkattgatacctgcggtaatattgtt

SEQ ID NO: 1099 - DNA, 51 bp, synthetic construct
  source 1..51: mol_type = other DNA
cgcaatctgatttacgtgagtgttnnkgatacctgcggtaatattgttgag

SEQ ID NO: 1100 - DNA, 51 bp, synthetic construct
  source 1..51: mol_type = other DNA
aatctgatttacgtgagtgttattnnkacctgcggtaatattgttgagcaa

SEQ ID NO: 1101 - DNA, 51 bp, synthetic construct
  source 1..51: mol_type = other DNA
ctgatttacgtgagtgttattgatnnktgcggtaatattgttgagcaaaag

SEQ ID NO: 1102 - DNA, 51 bp, synthetic construct
  source 1..51: mol_type = other DNA
atttacgtgagtgttattgataccnnkggtaatattgttgagcaaaagtct

SEQ ID NO: 1103 - DNA, 51 bp, synthetic construct
  source 1..51: mol_type = other DNA
tacgtgagtgttattgatacctgcnnkaatattgttgagcaaaagtctttt

SEQ ID NO: 1104 - DNA, 51 bp, synthetic construct
  source 1..51: mol_type = other DNA
gtgagtgttattgatacctgcggtnnkattgttgagcaaaagtcttttaat

SEQ ID NO: 1105 - DNA, 51 bp, synthetic construct
  source 1..51: mol_type = other DNA
agtgttattgatacctgcggtaatnnkgttgagcaaaagtcttttaatatc

SEQ ID NO: 1106 - DNA, 51 bp, synthetic construct
  source 1..51: mol_type = other DNA
gttattgatacctgcggtaatattnnkgagcaaaagtcttttaatatcgtt

SEQ ID NO: 1107 - DNA, 51 bp, synthetic construct
  source 1..51: mol_type = other DNA
attgatacctgcggtaatattgttnnkcaaaagtcttttaatatcgttaat

SEQ ID NO: 1108 - DNA, 51 bp, synthetic construct
  source 1..51: mol_type = other DNA
gatacctgcggtaatattgttgagnnkaagtcttttaatatcgttaatggt

SEQ ID NO: 1109 - DNA, 51 bp, synthetic construct
  source 1..51: mol_type = other DNA
acctgcggtaatattgttgagcaannktcttttaatatcgttaatggttac

SEQ ID NO: 1110 - DNA, 51 bp, synthetic construct
  source 1..51: mol_type = other DNA
tgcggtaatattgttgagcaaaagnnktttaatatcgttaatggttacgac

SEQ ID NO: 1111 - DNA, 51 bp, synthetic construct
  source 1..51: mol_type = other DNA
ggtaatattgttgagcaaaagtctnnkaatatcgttaatggttacgactac

SEQ ID NO: 1112 - DNA, 51 bp, synthetic construct
  source 1..51: mol_type = other DNA
aatattgttgagcaaaagtcttttnnkatcgttaatggttacgactaccaa

SEQ ID NO: 1113 - DNA, 51 bp, synthetic construct
  source 1..51: mol_type = other DNA
attgttgagcaaaagtcttttaatnnkgttaatggttacgactaccaaatt

SEQ ID NO: 1114 - DNA, 51 bp, synthetic construct
  source 1..51: mol_type = other DNA
gttgagcaaaagtcttttaatatcnnkaatggttacgactaccaaattaag

SEQ ID NO: 1115 - DNA, 51 bp, synthetic construct
  source 1..51: mol_type = other DNA
gagcaaaagtcttttaatatcgttnnkggttacgactaccaaattaagctt

SEQ ID NO: 1116 - DNA, 51 bp, synthetic construct
  source 1..51: mol_type = other DNA
caaaagtcttttaatatcgttaatnnktacgactaccaaattaagcttaaa

SEQ ID NO: 1117 - DNA, 51 bp, synthetic construct
  source 1..51: mol_type = other DNA
aagtcttttaatatcgttaatggtnnkgactaccaaattaagcttaaacaa

SEQ ID NO: 1118 - DNA, 51 bp, synthetic construct
  source 1..51: mol_type = other DNA
tcttttaatatcgttaatggttacnnktaccaaattaagcttaaacaacag

SEQ ID NO: 1119 - DNA, 51 bp, synthetic construct
  source 1..51: mol_type = other DNA
tttaatatcgttaatggttacgacnnkcaaattaagcttaaacaacaggaa

SEQ ID NO: 1120 - DNA, 51 bp, synthetic construct
  source 1..51: mol_type = other DNA
aatatcgttaatggttacgactacnnkattaagcttaaacaacaggaaggt

SEQ ID NO: 1121 - DNA, 51 bp, synthetic construct
  source 1..51: mol_type = other DNA
atcgttaatggttacgactaccaannkaagcttaaacaacaggaaggtgcc

SEQ ID NO: 1122 - DNA, 51 bp, synthetic construct
  source 1..51: mol_type = other DNA
gttaatggttacgactaccaaattnnkcttaaacaacaggaaggtgcccgc

SEQ ID NO: 1123 - DNA, 51 bp, synthetic construct
  source 1..51: mol_type = other DNA
aatggttacgactaccaaattaagnnkaaacaacaggaaggtgcccgccag

SEQ ID NO: 1124 - DNA, 51 bp, synthetic construct
  source 1..51: mol_type = other DNA
ggttacgactaccaaattaagcttnnkcaacaggaaggtgcccgccagatc

SEQ ID NO: 1125 - DNA, 51 bp, synthetic construct
  source 1..51: mol_type = other DNA
tacgactaccaaattaagcttaaannkcaggaaggtgcccgccagatcgcc

SEQ ID NO: 1126 - DNA, 51 bp, synthetic construct
  source 1..51: mol_type = other DNA
gactaccaaattaagcttaaacaannkgaaggtgcccgccagatcgcccgt

SEQ ID NO: 1127 - DNA, 51 bp, synthetic construct
  source 1..51: mol_type = other DNA
taccaaattaagcttaaacaacagnnkggtgcccgccagatcgcccgtaag

SEQ ID NO: 1128 - DNA, 51 bp, synthetic construct
  source 1..51: mol_type = other DNA
caaattaagcttaaacaacaggaannkgcccgccagatcgcccgtaaggag

SEQ ID NO: 1129 - DNA, 51 bp, synthetic construct
  source 1..51: mol_type = other DNA
attaagcttaaacaacaggaaggtnnkcgccagatcgcccgtaaggagtgg

SEQ ID NO: 1130 - DNA, 51 bp, synthetic construct
  source 1..51: mol_type = other DNA
aagcttaaacaacaggaaggtgccnnkcagatcgcccgtaaggagtggaag

SEQ ID NO: 1131 - DNA, 51 bp, synthetic construct
  source 1..51: mol_type = other DNA
cttaaacaacaggaaggtgcccgcnnkatcgcccgtaaggagtggaaggaa

SEQ ID NO: 1132 - DNA, 51 bp, synthetic construct
  source 1..51: mol_type = other DNA
aaacaacaggaaggtgcccgccagnnkgcccgtaaggagtggaaggaaatc

SEQ ID NO: 1133 - DNA, 51 bp, synthetic construct
  source 1..51: mol_type = other DNA
caacaggaaggtgcccgccagatcnnkcgtaaggagtggaaggaaatcgga

SEQ ID NO: 1134 - DNA, 51 bp, synthetic construct
  source 1..51: mol_type = other DNA
caggaaggtgcccgccagatcgccnnkaaggagtggaaggaaatcggaaaa

SEQ ID NO: 1135 - DNA, 51 bp, synthetic construct
  source 1..51: mol_type = other DNA
gaaggtgcccgccagatcgcccgtnnkgagtggaaggaaatcggaaaaatt

SEQ ID NO: 1136 - DNA, 51 bp, synthetic construct
  source 1..51: mol_type = other DNA
ggtgcccgccagatcgcccgtaagnnktggaaggaaatcggaaaaattaag

SEQ ID NO: 1137 - DNA, 51 bp, synthetic construct
  source 1..51: mol_type = other DNA
gcccgccagatcgcccgtaaggagnnkaaggaaatcggaaaaattaaggaa

SEQ ID NO: 1138 - DNA, 51 bp, synthetic construct
  source 1..51: mol_type = other DNA
cgccagatcgcccgtaaggagtggnnkgaaatcggaaaaattaaggaaatc

SEQ ID NO: 1139 - DNA, 51 bp, synthetic construct
  source 1..51: mol_type = other DNA
cagatcgcccgtaaggagtggaagnnkatcggaaaaattaaggaaatcaaa

SEQ ID NO: 1140 - DNA, 51 bp, synthetic construct
  source 1..51: mol_type = other DNA
atcgcccgtaaggagtggaaggaannkggaaaaattaaggaaatcaaagag

SEQ ID NO: 1141 - DNA, 51 bp, synthetic construct
  source 1..51: mol_type = other DNA
gcccgtaaggagtggaaggaaatcnnkaaaattaaggaaatcaaagaggga

SEQ ID NO: 1142 - DNA, 51 bp, synthetic construct
  source 1..51: mol_type = other DNA
cgtaaggagtggaaggaaatcggannkattaaggaaatcaaagagggatat

SEQ ID NO: 1143 - DNA, 51 bp, synthetic construct
  source 1..51: mol_type = other DNA
aaggagtggaaggaaatcggaaaannkaaggaaatcaaagagggatatctg

SEQ ID NO: 1144 - DNA, 51 bp, synthetic construct
  source 1..51: mol_type = other DNA
gagtggaaggaaatcggaaaaattnnkgaaatcaaagagggatatctgagc

SEQ ID NO: 1145 - DNA, 51 bp, synthetic construct
  source 1..51: mol_type = other DNA
tggaaggaaatcggaaaaattaagnnkatcaaagagggatatctgagcttg

SEQ ID NO: 1146 - DNA, 51 bp, synthetic construct
  source 1..51: mol_type = other DNA
aaggaaatcggaaaaattaaggaannkaaagagggatatctgagcttggtt

SEQ ID NO: 1147 - DNA, 51 bp, synthetic construct
  source 1..51: mol_type = other DNA
gaaatcggaaaaattaaggaaatcnnkgagggatatctgagcttggttatt

SEQ ID NO: 1148 - DNA, 51 bp, synthetic construct
  source 1..51: mol_type = other DNA
atcggaaaaattaaggaaatcaaannkggatatctgagcttggttattcat

SEQ ID NO: 1149 - DNA, 51 bp, synthetic construct
  source 1..51: mol_type = other DNA
ggaaaaattaaggaaatcaaagagnnktatctgagcttggttattcatgaa

SEQ ID NO: 1150 - DNA, 51 bp, synthetic construct
  source 1..51: mol_type = other DNA
aaaattaaggaaatcaaagagggannkctgagcttggttattcatgaaatc

SEQ ID NO: 1151 - DNA, 51 bp, synthetic construct
  source 1..51: mol_type = other DNA
attaaggaaatcaaagagggatatnnkagcttggttattcatgaaatctca

SEQ ID NO: 1152 - DNA, 51 bp, synthetic construct
  source 1..51: mol_type = other DNA
aaggaaatcaaagagggatatctgnnkttggttattcatgaaatctcaaag

SEQ ID NO: 1153 - DNA, 51 bp, synthetic construct
  source 1..51: mol_type = other DNA
gaaatcaaagagggatatctgagcnnkgttattcatgaaatctcaaagatg

SEQ ID NO: 1154 - DNA, 51 bp, synthetic construct
  source 1..51: mol_type = other DNA
atcaaagagggatatctgagcttgnnkattcatgaaatctcaaagatggtt

SEQ ID NO: 1155 - DNA, 51 bp, synthetic construct
  source 1..51: mol_type = other DNA
aaagagggatatctgagcttggttnnkcatgaaatctcaaagatggttatt

SEQ ID NO: 1156 - DNA, 51 bp, synthetic construct
  source 1..51: mol_type = other DNA
gagggatatctgagcttggttattnnkgaaatctcaaagatggttattaag

SEQ ID NO: 1157 - DNA, 51 bp, synthetic construct
  source 1..51: mol_type = other DNA
ggatatctgagcttggttattcatnnkatctcaaagatggttattaagtac

SEQ ID NO: 1158 - DNA, 51 bp, synthetic construct
  source 1..51: mol_type = other DNA
tatctgagcttggttattcatgaannktcaaagatggttattaagtacaac

SEQ ID NO: 1159 - DNA, 51 bp, synthetic construct
  source 1..51: mol_type = other DNA
ctgagcttggttattcatgaaatcnnkaagatggttattaagtacaacgcc

SEQ ID NO: 1160 - DNA, 51 bp, synthetic construct
  source 1..51: mol_type = other DNA
agcttggttattcatgaaatctcannkatggttattaagtacaacgccatc

SEQ ID NO: 1161 - DNA, 51 bp, synthetic construct
  source 1..51: mol_type = other DNA
ttggttattcatgaaatctcaaagnnkgttattaagtacaacgccatcatc

SEQ ID NO: 1162 - DNA, 51 bp, synthetic construct
  source 1..51: mol_type = other DNA
gttattcatgaaatctcaaagatgnnkattaagtacaacgccatcatcgct

SEQ ID NO: 1163 - DNA, 51 bp, synthetic construct
  source 1..51: mol_type = other DNA
attcatgaaatctcaaagatggttnnkaagtacaacgccatcatcgctatg

SEQ ID NO: 1164 - DNA, 51 bp, synthetic construct
  source 1..51: mol_type = other DNA
catgaaatctcaaagatggttattnnktacaacgccatcatcgctatggaa

SEQ ID NO: 1165 - DNA, 51 bp, synthetic construct
  source 1..51: mol_type = other DNA
gaaatctcaaagatggttattaagnnkaacgccatcatcgctatggaagac

SEQ ID NO: 1166 - DNA, 51 bp, synthetic construct
  source 1..51: mol_type = other DNA
atctcaaagatggttattaagtacnnkgccatcatcgctatggaagactta

SEQ ID NO: 1167 - DNA, 51 bp, synthetic construct
  source 1..51: mol_type = other DNA
tcaaagatggttattaagtacaacnnkatcatcgctatggaagacttatcg

SEQ ID NO: 1168 - DNA, 51 bp, synthetic construct
  source 1..51: mol_type = other DNA
aagatggttattaagtacaacgccnnkatcgctatggaagacttatcgtat

SEQ ID NO: 1169 - DNA, 51 bp, synthetic construct
  source 1..51: mol_type = other DNA
atggttattaagtacaacgccatcnnkgctatggaagacttatcgtatggg

SEQ ID NO: 1170 - DNA, 51 bp, synthetic construct
  source 1..51: mol_type = other DNA
gttattaagtacaacgccatcatcnnkatggaagacttatcgtatgggttt

SEQ ID NO: 1171 - DNA, 51 bp, synthetic construct
  source 1..51: mol_type = other DNA
attaagtacaacgccatcatcgctnnkgaagacttatcgtatgggtttaaa

SEQ ID NO: 1172 - DNA, 51 bp, synthetic construct
  source 1..51: mol_type = other DNA
aagtacaacgccatcatcgctatgnnkgacttatcgtatgggtttaaaaag

SEQ ID NO: 1173 - DNA, 51 bp, synthetic construct
  source 1..51: mol_type = other DNA
tacaacgccatcatcgctatggaannkttatcgtatgggtttaaaaagggt

SEQ ID NO: 1174 - DNA, 51 bp, synthetic construct
  source 1..51: mol_type = other DNA
aacgccatcatcgctatggaagacnnktcgtatgggtttaaaaagggtcgt

SEQ ID NO: 1175 - DNA, 51 bp, synthetic construct
  source 1..51: mol_type = other DNA
gccatcatcgctatggaagacttannktatgggtttaaaaagggtcgtttc

SEQ ID NO: 1176 - DNA, 51 bp, synthetic construct
  source 1..51: mol_type = other DNA
atcatcgctatggaagacttatcgnnkgggtttaaaaagggtcgtttcaaa

SEQ ID NO: 1177 - DNA, 51 bp, synthetic construct
  source 1..51: mol_type = other DNA
atcgctatggaagacttatcgtatnnktttaaaaagggtcgtttcaaagtt

SEQ ID NO: 1178 - DNA, 51 bp, synthetic construct
  source 1..51: mol_type = other DNA
gctatggaagacttatcgtatgggnnkaaaaagggtcgtttcaaagttgag

SEQ ID NO: 1179 - DNA, 51 bp, synthetic construct
  source 1..51: mol_type = other DNA
atggaagacttatcgtatgggtttnnkaagggtcgtttcaaagttgagcgc

SEQ ID NO: 1180 - DNA, 51 bp, synthetic construct
  source 1..51: mol_type = other DNA
gaagacttatcgtatgggtttaaannkggtcgtttcaaagttgagcgccag

SEQ ID NO: 1181 - DNA, 51 bp, synthetic construct
  source 1..51: mol_type = other DNA
gacttatcgtatgggtttaaaaagnnkcgtttcaaagttgagcgccaggtc

SEQ ID NO: 1182 - DNA, 51 bp, synthetic construct
  source 1..51: mol_type = other DNA
ttatcgtatgggtttaaaaagggtnnkttcaaagttgagcgccaggtctac

SEQ ID NO: 1183 - DNA, 51 bp, synthetic construct
  source 1..51: mol_type = other DNA
tcgtatgggtttaaaaagggtcgtnnkaaagttgagcgccaggtctaccaa

SEQ ID NO: 1184 - DNA, 51 bp, synthetic construct
  source 1..51: mol_type = other DNA
tatgggtttaaaaagggtcgtttcnnkgttgagcgccaggtctaccaaaag

SEQ ID NO: 1185 - DNA, 51 bp, synthetic construct
  source 1..51: mol_type = other DNA
gggtttaaaaagggtcgtttcaaannkgagcgccaggtctaccaaaagttt

SEQ ID NO: 1186 - DNA, 51 bp, synthetic construct
  source 1..51: mol_type = other DNA
tttaaaaagggtcgtttcaaagttnnkcgccaggtctaccaaaagtttgaa

SEQ ID NO: 1187 - DNA, 51 bp, synthetic construct
  source 1..51: mol_type = other DNA
aaaaagggtcgtttcaaagttgagnnkcaggtctaccaaaagtttgaaacg

SEQ ID NO: 1188 - DNA, 51 bp, synthetic construct
  source 1..51: mol_type = other DNA
aagggtcgtttcaaagttgagcgcnnkgtctaccaaaagtttgaaacgatg

SEQ ID NO: 1189 - DNA, 51 bp, synthetic construct
  source 1..51: mol_type = other DNA
ggtcgtttcaaagttgagcgccagnnktaccaaaagtttgaaacgatgctt

SEQ ID NO: 1190 - DNA, 51 bp, synthetic construct
  source 1..51: mol_type = other DNA
cgtttcaaagttgagcgccaggtcnnkcaaaagtttgaaacgatgcttatt

SEQ ID NO: 1191 - DNA, 51 bp, synthetic construct
  source 1..51: mol_type = other DNA
ttcaaagttgagcgccaggtctacnnkaagtttgaaacgatgcttattaat

SEQ ID NO: 1192 - DNA, 51 bp, synthetic construct
  source 1..51: mol_type = other DNA
aaagttgagcgccaggtctaccaannktttgaaacgatgcttattaataaa

SEQ ID NO: 1193 - DNA, 51 bp, synthetic construct
  source 1..51: mol_type = other DNA
gttgagcgccaggtctaccaaaagnnkgaaacgatgcttattaataaatta

SEQ ID NO: 1194 - DNA, 51 bp, synthetic construct
  source 1..51: mol_type = other DNA
gagcgccaggtctaccaaaagtttnnkacgatgcttattaataaattaaac

SEQ ID NO: 1195 - DNA, 51 bp, synthetic construct
  source 1..51: mol_type = other DNA
cgccaggtctaccaaaagtttgaannkatgcttattaataaattaaactac

SEQ ID NO: 1196 - DNA, 51 bp, synthetic construct
  source 1..51: mol_type = other DNA
caggtctaccaaaagtttgaaacgnnkcttattaataaattaaactacttg

SEQ ID NO: 1197 - DNA, 51 bp, synthetic construct
  source 1..51: mol_type = other DNA
gtctaccaaaagtttgaaacgatgnnkattaataaattaaactacttggtt

SEQ ID NO: 1198 - DNA, 51 bp, synthetic construct
  source 1..51: mol_type = other DNA
taccaaaagtttgaaacgatgcttnnkaataaattaaactacttggttttc

SEQ ID NO: 1199 - DNA, 51 bp, synthetic construct
  source 1..51: mol_type = other DNA
caaaagtttgaaacgatgcttattnnkaaattaaactacttggttttcaaa

SEQ ID NO: 1200 - DNA, 51 bp, synthetic construct
  source 1..51: mol_type = other DNA
aagtttgaaacgatgcttattaatnnkttaaactacttggttttcaaagat

SEQ ID NO: 1201 - DNA, 51 bp, synthetic construct
  source 1..51: mol_type = other DNA
tttgaaacgatgcttattaataaannkaactacttggttttcaaagatatc

SEQ ID NO: 1202 - DNA, 51 bp, synthetic construct
  source 1..51: mol_type = other DNA
gaaacgatgcttattaataaattannktacttggttttcaaagatatctct

SEQ ID NO: 1203 - DNA, 51 bp, synthetic construct
  source 1..51: mol_type = other DNA
acgatgcttattaataaattaaacnnkttggttttcaaagatatctctatt

SEQ ID NO: 1204 - DNA, 51 bp, synthetic construct
  source 1..51: mol_type = other DNA
atgcttattaataaattaaactacnnkgttttcaaagatatctctattacc

SEQ ID NO: 1205 - DNA, 51 bp, synthetic construct
  source 1..51: mol_type = other DNA
cttattaataaattaaactacttgnnkttcaaagatatctctattaccgag

SEQ ID NO: 1206 - DNA, 51 bp, synthetic construct
  source 1..51: mol_type = other DNA
attaataaattaaactacttggttnnkaaagatatctctattaccgagaat

SEQ ID NO: 1207 - DNA, 51 bp, synthetic construct
  source 1..51: mol_type = other DNA
aataaattaaactacttggttttcnnkgatatctctattaccgagaatgga

SEQ ID NO: 1208 - DNA, 51 bp, synthetic construct
  source 1..51: mol_type = other DNA
aaattaaactacttggttttcaaannkatctctattaccgagaatggaggt

SEQ ID NO: 1209 - DNA, 51 bp, synthetic construct
  source 1..51: mol_type = other DNA
ttaaactacttggttttcaaagatnnktctattaccgagaatggaggttta

SEQ ID NO: 1210 - DNA, 51 bp, synthetic construct
  source 1..51: mol_type = other DNA
aactacttggttttcaaagatatcnnkattaccgagaatggaggtttactg

SEQ ID NO: 1211 - DNA, 51 bp, synthetic construct
  source 1..51: mol_type = other DNA
tacttggttttcaaagatatctctnnkaccgagaatggaggtttactgaaa

SEQ ID NO: 1212 - DNA, 51 bp, synthetic construct
  source 1..51: mol_type = other DNA
ttggttttcaaagatatctctattnnkgagaatggaggtttactgaaagga

SEQ ID NO: 1213 - DNA, 51 bp, synthetic construct
  source 1..51: mol_type = other DNA
gttttcaaagatatctctattaccnnkaatggaggtttactgaaaggatac

SEQ ID NO: 1214 - DNA, 51 bp, synthetic construct
  source 1..51: mol_type = other DNA
ttcaaagatatctctattaccgagnnkggaggtttactgaaaggataccag

SEQ ID NO: 1215 - DNA, 51 bp, synthetic construct
  source 1..51: mol_type = other DNA
aaagatatctctattaccgagaatnnkggtttactgaaaggataccagtta

SEQ ID NO: 1216 - DNA, 51 bp, synthetic construct
  source 1..51: mol_type = other DNA
gatatctctattaccgagaatggannkttactgaaaggataccagttaacg

SEQ ID NO: 1217 - DNA, 51 bp, synthetic construct
  source 1..51: mol_type = other DNA
atctctattaccgagaatggaggtnnkctgaaaggataccagttaacgtat

SEQ ID NO: 1218 - DNA, 51 bp, synthetic construct
  source 1..51: mol_type = other DNA
tctattaccgagaatggaggtttannkaaaggataccagttaacgtatatc

SEQ ID NO: 1219 - DNA, 51 bp, synthetic construct
  source 1..51: mol_type = other DNA
attaccgagaatggaggtttactgnnkggataccagttaacgtatatcccc

SEQ ID NO: 1220 - DNA, 51 bp, synthetic construct
  source 1..51: mol_type = other DNA
accgagaatggaggtttactgaaannktaccagttaacgtatatccccgat

SEQ ID NO: 1221 - DNA, 51 bp, synthetic construct
  source 1..51: mol_type = other DNA
gagaatggaggtttactgaaaggannkcagttaacgtatatccccgataag

SEQ ID NO: 1222 - DNA, 51 bp, synthetic construct
  source 1..51: mol_type = other DNA
aatggaggtttactgaaaggatacnnkttaacgtatatccccgataagctt

SEQ ID NO: 1223 - DNA, 51 bp, synthetic construct
  source 1..51: mol_type = other DNA
ggaggtttactgaaaggataccagnnkacgtatatccccgataagcttaaa

SEQ ID NO: 1224 - DNA, 51 bp, synthetic construct
  source 1..51: mol_type = other DNA
ggtttactgaaaggataccagttannktatatccccgataagcttaaaaac

SEQ ID NO: 1225 - DNA, 51 bp, synthetic construct
  source 1..51: mol_type = other DNA
ttactgaaaggataccagttaacgnnkatccccgataagcttaaaaacgtg

SEQ ID NO: 1226 - DNA, 51 bp, synthetic construct
  source 1..51: mol_type = other DNA
ctgaaaggataccagttaacgtatnnkcccgataagcttaaaaacgtgggc

SEQ ID NO: 1227 - DNA, 51 bp, synthetic construct
  source 1..51: mol_type = other DNA
aaaggataccagttaacgtatatcnnkgataagcttaaaaacgtgggccat

SEQ ID NO: 1228 - DNA, 51 bp, synthetic construct
  source 1..51: mol_type = other DNA
ggataccagttaacgtatatccccnnkaagcttaaaaacgtgggccatcag

SEQ ID NO: 1229 - DNA, 51 bp, synthetic construct
  source 1..51: mol_type = other DNA
taccagttaacgtatatccccgatnnkcttaaaaacgtgggccatcagtgt

SEQ ID NO: 1230 - DNA, 51 bp, synthetic construct
  source 1..51: mol_type = other DNA
cagttaacgtatatccccgataagnnkaaaaacgtgggccatcagtgtggc

SEQ ID NO: 1231 - DNA, 51 bp, synthetic construct
  source 1..51: mol_type = other DNA
ttaacgtatatccccgataagcttnnkaacgtgggccatcagtgtggctgt

SEQ ID NO: 1232 - DNA, 51 bp, synthetic construct
  source 1..51: mol_type = other DNA
acgtatatccccgataagcttaaannkgtgggccatcagtgtggctgtatt

SEQ ID NO: 1233 - DNA, 51 bp, synthetic construct
  source 1..51: mol_type = other DNA
tatatccccgataagcttaaaaacnnkggccatcagtgtggctgtattttc

SEQ ID NO: 1234 - DNA, 51 bp, synthetic construct
  source 1..51: mol_type = other DNA
atccccgataagcttaaaaacgtgnnkcatcagtgtggctgtattttctat

SEQ ID NO: 1235 - DNA, 51 bp, synthetic construct
  source 1..51: mol_type = other DNA
cccgataagcttaaaaacgtgggcnnkcagtgtggctgtattttctatgtg

SEQ ID NO: 1236 - DNA, 51 bp, synthetic construct
  source 1..51: mol_type = other DNA
gataagcttaaaaacgtgggccatnnktgtggctgtattttctatgtgccc

SEQ ID NO: 1237 - DNA, 51 bp, synthetic construct
  source 1..51: mol_type = other DNA
aagcttaaaaacgtgggccatcagnnkggctgtattttctatgtgcccgcg

SEQ ID NO: 1238 - DNA, 51 bp, synthetic construct
  source 1..51: mol_type = other DNA
cttaaaaacgtgggccatcagtgtnnktgtattttctatgtgcccgcggca

SEQ ID NO: 1239 - DNA, 51 bp, synthetic construct
  source 1..51: mol_type = other DNA
aaaaacgtgggccatcagtgtggcnnkattttctatgtgcccgcggcatat

SEQ ID NO: 1240 - DNA, 51 bp, synthetic construct
  source 1..51: mol_type = other DNA
aacgtgggccatcagtgtggctgtnnkttctatgtgcccgcggcatataca

SEQ ID NO: 1241 - DNA, 51 bp, synthetic construct
  source 1..51: mol_type = other DNA
gtgggccatcagtgtggctgtattnnktatgtgcccgcggcatatacatca

SEQ ID NO: 1242 - DNA, 51 bp, synthetic construct
  source 1..51: mol_type = other DNA
ggccatcagtgtggctgtattttcnnkgtgcccgcggcatatacatcaaaa

SEQ ID NO: 1243 - DNA, 51 bp, synthetic construct
  source 1..51: mol_type = other DNA
catcagtgtggctgtattttctatnnkcccgcggcatatacatcaaaaatt

SEQ ID NO: 1244 - DNA, 51 bp, synthetic construct
  source 1..51: mol_type = other DNA
cagtgtggctgtattttctatgtgnnkgcggcatatacatcaaaaattgac

SEQ ID NO: 1245 - DNA, 51 bp, synthetic construct
  source 1..51: mol_type = other DNA
tgtggctgtattttctatgtgcccnnkgcatatacatcaaaaattgacccg

SEQ ID NO: 1246 - DNA, 51 bp, synthetic construct
  source 1..51: mol_type = other DNA
ggctgtattttctatgtgcccgcgnnktatacatcaaaaattgacccgacg

SEQ ID NO: 1247 - DNA, 51 bp, synthetic construct
  source 1..51: mol_type = other DNA
tgtattttctatgtgcccgcggcannkacatcaaaaattgacccgacgacg

SEQ ID NO: 1248 - DNA, 51 bp, synthetic construct
  source 1..51: mol_type = other DNA
attttctatgtgcccgcggcatatnnktcaaaaattgacccgacgacgggt

SEQ ID NO: 1249 - DNA, 51 bp, synthetic construct
  source 1..51: mol_type = other DNA
ttctatgtgcccgcggcatatacannkaaaattgacccgacgacgggtttc

SEQ ID NO: 1250 - DNA, 51 bp, synthetic construct
  source 1..51: mol_type = other DNA
tatgtgcccgcggcatatacatcannkattgacccgacgacgggtttcgtt

SEQ ID NO: 1251 - DNA, 51 bp, synthetic construct
  source 1..51: mol_type = other DNA
gtgcccgcggcatatacatcaaaannkgacccgacgacgggtttcgttaat

SEQ ID NO: 1252 - DNA, 51 bp, synthetic construct
  source 1..51: mol_type = other DNA
cccgcggcatatacatcaaaaattnnkccgacgacgggtttcgttaatatc

SEQ ID NO: 1253 - DNA, 51 bp, synthetic construct
  source 1..51: mol_type = other DNA
gcggcatatacatcaaaaattgacnnkacgacgggtttcgttaatatcttc

SEQ ID NO: 1254 - DNA, 51 bp, synthetic construct
  source 1..51: mol_type = other DNA
gcatatacatcaaaaattgacccgnnkacgggtttcgttaatatcttcaag

SEQ ID NO: 1255 - DNA, 51 bp, synthetic construct
  source 1..51: mol_type = other DNA
tatacatcaaaaattgacccgacgnnkggtttcgttaatatcttcaagttc

SEQ ID NO: 1256 - DNA, 51 bp, synthetic construct
  source 1..51: mol_type = other DNA
acatcaaaaattgacccgacgacgnnkttcgttaatatcttcaagttcaaa

SEQ ID NO: 1257 - DNA, 51 bp, synthetic construct
  source 1..51: mol_type = other DNA
tcaaaaattgacccgacgacgggtnnkgttaatatcttcaagttcaaagat

SEQ ID NO: 1258 - DNA, 51 bp, synthetic construct
  source 1..51: mol_type = other DNA
aaaattgacccgacgacgggtttcnnkaatatcttcaagttcaaagatctg

SEQ ID NO: 1259 - DNA, 51 bp, synthetic construct
  source 1..51: mol_type = other DNA
attgacccgacgacgggtttcgttnnkatcttcaagttcaaagatctgaca

SEQ ID NO: 1260 - DNA, 51 bp, synthetic construct
  source 1..51: mol_type = other DNA
gacccgacgacgggtttcgttaatnnkttcaagttcaaagatctgacagtt

SEQ ID NO: 1261 - DNA, 51 bp, synthetic construct
  source 1..51: mol_type = other DNA
ccgacgacgggtttcgttaatatcnnkaagttcaaagatctgacagttgat

SEQ ID NO: 1262 - DNA, 51 bp, synthetic construct
  source 1..51: mol_type = other DNA
acgacgggtttcgttaatatcttcnnkttcaaagatctgacagttgatgca

SEQ ID NO: 1263 - DNA, 51 bp, synthetic construct
  source 1..51: mol_type = other DNA
acgggtttcgttaatatcttcaagnnkaaagatctgacagttgatgcaaaa

SEQ ID NO: 1264 - DNA, 51 bp, synthetic construct
  source 1..51: mol_type = other DNA
ggtttcgttaatatcttcaagttcnnkgatctgacagttgatgcaaaacgc

SEQ ID NO: 1265 - DNA, 51 bp, synthetic construct
  source 1..51: mol_type = other DNA
ttcgttaatatcttcaagttcaaannkctgacagttgatgcaaaacgcgaa

SEQ ID NO: 1266 - DNA, 51 bp, synthetic construct
  source 1..51: mol_type = other DNA
gttaatatcttcaagttcaaagatnnkacagttgatgcaaaacgcgaattc

SEQ ID NO: 1267 - DNA, 51 bp, synthetic construct
  source 1..51: mol_type = other DNA
aatatcttcaagttcaaagatctgnnkgttgatgcaaaacgcgaattcatt

SEQ ID NO: 1268 - DNA, 51 bp, synthetic construct
  source 1..51: mol_type = other DNA
atcttcaagttcaaagatctgacannkgatgcaaaacgcgaattcattaag

SEQ ID NO: 1269 - DNA, 51 bp, synthetic construct
  source 1..51: mol_type = other DNA
ttcaagttcaaagatctgacagttnnkgcaaaacgcgaattcattaagaag

SEQ ID NO: 1270 - DNA, 51 bp, synthetic construct
  source 1..51: mol_type = other DNA
aagttcaaagatctgacagttgatnnkaaacgcgaattcattaagaagttc

SEQ ID NO: 1271 - DNA, 51 bp, synthetic construct
  source 1..51: mol_type = other DNA
ttcaaagatctgacagttgatgcannkcgcgaattcattaagaagttcgat

SEQ ID NO: 1272 - DNA, 51 bp, synthetic construct
  source 1..51: mol_type = other DNA
aaagatctgacagttgatgcaaaannkgaattcattaagaagttcgatagt

SEQ ID NO: 1273 - DNA, 51 bp, synthetic construct
  source 1..51: mol_type = other DNA
gatctgacagttgatgcaaaacgcnnkttcattaagaagttcgatagtatt

SEQ ID NO: 1274 - DNA, 51 bp, synthetic construct
  source 1..51: mol_type = other DNA
ctgacagttgatgcaaaacgcgaannkattaagaagttcgatagtattcgc

SEQ ID NO: 1275 - DNA, 51 bp, synthetic construct
  source 1..51: mol_type = other DNA
acagttgatgcaaaacgcgaattcnnkaagaagttcgatagtattcgctat

SEQ ID NO: 1276 - DNA, 51 bp, synthetic construct
  source 1..51: mol_type = other DNA
gttgatgcaaaacgcgaattcattnnkaagttcgatagtattcgctatgac

SEQ ID NO: 1277 - DNA, 51 bp, synthetic construct
  source 1..51: mol_type = other DNA
gatgcaaaacgcgaattcattaagnnkttcgatagtattcgctatgactcc

SEQ ID NO: 1278 - DNA, 51 bp, synthetic construct
  source 1..51: mol_type = other DNA
gcaaaacgcgaattcattaagaagnnkgatagtattcgctatgactccgag

SEQ ID NO: 1279 - DNA, 51 bp, synthetic construct
  source 1..51: mol_type = other DNA
aaacgcgaattcattaagaagttcnnkagtattcgctatgactccgagaaa

SEQ ID NO: 1280 - DNA, 51 bp, synthetic construct
  source 1..51: mol_type = other DNA
cgcgaattcattaagaagttcgatnnkattcgctatgactccgagaaaaat

SEQ ID NO: 1281 - DNA, 51 bp, synthetic construct
  source 1..51: mol_type = other DNA
gaattcattaagaagttcgatagtnnkcgctatgactccgagaaaaatttg

SEQ ID NO: 1282 - DNA, 51 bp, synthetic construct
  source 1..51: mol_type = other DNA
ttcattaagaagttcgatagtattnnktatgactccgagaaaaatttgttt

SEQ ID NO: 1283 - DNA, 51 bp, synthetic construct
  source 1..51: mol_type = other DNA
attaagaagttcgatagtattcgcnnkgactccgagaaaaatttgttttgc

SEQ ID NO: 1284 - DNA, 51 bp, synthetic construct
  source 1..51: mol_type = other DNA
aagaagttcgatagtattcgctatnnktccgagaaaaatttgttttgcttc

SEQ ID NO: 1285 - DNA, 51 bp, synthetic construct
  source 1..51: mol_type = other DNA
aagttcgatagtattcgctatgacnnkgagaaaaatttgttttgcttcact

SEQ ID NO: 1286 - DNA, 51 bp, synthetic construct
  source 1..51: mol_type = other DNA
ttcgatagtattcgctatgactccnnkaaaaatttgttttgcttcactttt

SEQ ID NO: 1287 - DNA, 51 bp, synthetic construct
  source 1..51: mol_type = other DNA
gatagtattcgctatgactccgagnnkaatttgttttgcttcacttttgac

SEQ ID NO: 1288 - DNA, 51 bp, synthetic construct
  source 1..51: mol_type = other DNA
agtattcgctatgactccgagaaannkttgttttgcttcacttttgactac

SEQ ID NO: 1289 - DNA, 51 bp, synthetic construct
  source 1..51: mol_type = other DNA
attcgctatgactccgagaaaaatnnkttttgcttcacttttgactacaat

SEQ ID NO: 1290 - DNA, 51 bp, synthetic construct
  source 1..51: mol_type = other DNA
cgctatgactccgagaaaaatttgnnktgcttcacttttgactacaataac

SEQ ID NO: 1291 - DNA, 51 bp, synthetic construct
  source 1..51: mol_type = other DNA
tatgactccgagaaaaatttgtttnnkttcacttttgactacaataacttt

SEQ ID NO: 1292 - DNA, 51 bp, synthetic construct
  source 1..51: mol_type = other DNA
gactccgagaaaaatttgttttgcnnkacttttgactacaataactttatt

SEQ ID NO: 1293 - DNA, 51 bp, synthetic construct
  source 1..51: mol_type = other DNA
tccgagaaaaatttgttttgcttcnnktttgactacaataactttattact

SEQ ID NO: 1294 - DNA, 51 bp, synthetic construct
  source 1..51: mol_type = other DNA
gagaaaaatttgttttgcttcactnnkgactacaataactttattactcag

SEQ ID NO: 1295 - DNA, 51 bp, synthetic construct
  source 1..51: mol_type = other DNA
aaaaatttgttttgcttcacttttnnktacaataactttattactcagaat

SEQ ID NO: 1296 - DNA, 51 bp, synthetic construct
  source 1..51: mol_type = other DNA
aatttgttttgcttcacttttgacnnkaataactttattactcagaataca

SEQ ID NO: 1297 - DNA, 51 bp, synthetic construct
  source 1..51: mol_type = other DNA
ttgttttgcttcacttttgactacnnkaactttattactcagaatacagtc

SEQ ID NO: 1298 - DNA, 51 bp, synthetic construct
  source 1..51: mol_type = other DNA
ttttgcttcacttttgactacaatnnktttattactcagaatacagtcatg

SEQ ID NO: 1299 - DNA, 51 bp, synthetic construct
  source 1..51: mol_type = other DNA
tgcttcacttttgactacaataacnnkattactcagaatacagtcatgagt

SEQ ID NO: 1300 - DNA, 51 bp, synthetic construct
  source 1..51: mol_type = other DNA
ttcacttttgactacaataactttnnkactcagaatacagtcatgagtaaa

SEQ ID NO: 1301 - DNA, 51 bp, synthetic construct
  source 1..51: mol_type = other DNA
acttttgactacaataactttattnnkcagaatacagtcatgagtaaaagc

SEQ ID NO: 1302 - DNA, 51 bp, synthetic construct
  source 1..51: mol_type = other DNA
tttgactacaataactttattactnnkaatacagtcatgagtaaaagctcc

SEQ ID NO: 1303 - DNA, 51 bp, synthetic construct
  source 1..51: mol_type = other DNA
gactacaataactttattactcagnnkacagtcatgagtaaaagctcctgg

SEQ ID NO: 1304 - DNA, 51 bp, synthetic construct
  source 1..51: mol_type = other DNA
tacaataactttattactcagaatnnkgtcatgagtaaaagctcctggtcg

SEQ ID NO: 1305 - DNA, 51 bp, synthetic construct
  source 1..51: mol_type = other DNA
aataactttattactcagaatacannkatgagtaaaagctcctggtcggtt

SEQ ID NO: 1306 - DNA, 51 bp, synthetic construct
  source 1..51: mol_type = other DNA
aactttattactcagaatacagtcnnkagtaaaagctcctggtcggtttac

SEQ ID NO: 1307 - DNA, 51 bp, synthetic construct
  source 1..51: mol_type = other DNA
tttattactcagaatacagtcatgnnkaaaagctcctggtcggtttacacg

SEQ ID NO: 1308 - DNA, 51 bp, synthetic construct
  source 1..51: mol_type = other DNA
attactcagaatacagtcatgagtnnkagctcctggtcggtttacacgtac

SEQ ID NO: 1309 - DNA, 51 bp, synthetic construct
  source 1..51: mol_type = other DNA
actcagaatacagtcatgagtaaannktcctggtcggtttacacgtacggg

SEQ ID NO: 1310 - DNA, 51 bp, synthetic construct
  source 1..51: mol_type = other DNA
cagaatacagtcatgagtaaaagcnnktggtcggtttacacgtacggggta

SEQ ID NO: 1311 - DNA, 51 bp, synthetic construct
  source 1..51: mol_type = other DNA
aatacagtcatgagtaaaagctccnnktcggtttacacgtacggggtacgc

SEQ ID NO: 1312 - DNA, 51 bp, synthetic construct
  source 1..51: mol_type = other DNA
acagtcatgagtaaaagctcctggnnkgtttacacgtacggggtacgcatc

SEQ ID NO: 1313 - DNA, 51 bp, synthetic construct
  source 1..51: mol_type = other DNA
gtcatgagtaaaagctcctggtcgnnktacacgtacggggtacgcatcaaa

SEQ ID NO: 1314 - DNA, 51 bp, synthetic construct
  source 1..51: mol_type = other DNA
atgagtaaaagctcctggtcggttnnkacgtacggggtacgcatcaaacgt

SEQ ID NO: 1315 - DNA, 51 bp, synthetic construct
  source 1..51: mol_type = other DNA
agtaaaagctcctggtcggtttacnnktacggggtacgcatcaaacgtcgt

SEQ ID NO: 1316 - DNA, 51 bp, synthetic construct
  source 1..51: mol_type = other DNA
aaaagctcctggtcggtttacacgnnkggggtacgcatcaaacgtcgtttt

SEQ ID NO: 1317 - DNA, 51 bp, synthetic construct
  source 1..51: mol_type = other DNA
agctcctggtcggtttacacgtacnnkgtacgcatcaaacgtcgttttgtg

SEQ ID NO: 1318 - DNA, 51 bp, synthetic construct
  source 1..51: mol_type = other DNA
tcctggtcggtttacacgtacgggnnkcgcatcaaacgtcgttttgtgaat

SEQ ID NO: 1319 - DNA, 51 bp, synthetic construct
  source 1..51: mol_type = other DNA
tggtcggtttacacgtacggggtannkatcaaacgtcgttttgtgaatggt

SEQ ID NO: 1320 - DNA, 51 bp, synthetic construct
  source 1..51: mol_type = other DNA
tcggtttacacgtacggggtacgcnnkaaacgtcgttttgtgaatggtcgt

SEQ ID NO: 1321 - DNA, 51 bp, synthetic construct
  source 1..51: mol_type = other DNA
gtttacacgtacggggtacgcatcnnkcgtcgttttgtgaatggtcgtttt

SEQ ID NO: 1322 - DNA, 51 bp, synthetic construct
  source 1..51: mol_type = other DNA
tacacgtacggggtacgcatcaaannkcgttttgtgaatggtcgttttagt

SEQ ID NO: 1323 - DNA, 51 bp, synthetic construct
  source 1..51: mol_type = other DNA
acgtacggggtacgcatcaaacgtnnktttgtgaatggtcgttttagtaat

SEQ ID NO: 1324 - DNA, 51 bp, synthetic construct
  source 1..51: mol_type = other DNA
tacggggtacgcatcaaacgtcgtnnkgtgaatggtcgttttagtaatgag

SEQ ID NO: 1325 - DNA, 51 bp, synthetic construct
  source 1..51: mol_type = other DNA
ggggtacgcatcaaacgtcgttttnnkaatggtcgttttagtaatgagtcg

SEQ ID NO: 1326 - DNA, 51 bp, synthetic construct
  source 1..51: mol_type = other DNA
gtacgcatcaaacgtcgttttgtgnnkggtcgttttagtaatgagtcggat

SEQ ID NO: 1327 - DNA, 51 bp, synthetic construct
  source 1..51: mol_type = other DNA
cgcatcaaacgtcgttttgtgaatnnkcgttttagtaatgagtcggataca

SEQ ID NO: 1328 - DNA, 51 bp, synthetic construct
  source 1..51: mol_type = other DNA
atcaaacgtcgttttgtgaatggtnnktttagtaatgagtcggatacaatt

SEQ ID NO: 1329 - DNA, 51 bp, synthetic construct
  source 1..51: mol_type = other DNA
aaacgtcgttttgtgaatggtcgtnnkagtaatgagtcggatacaattgat

SEQ ID NO: 1330 - DNA, 51 bp, synthetic construct
  source 1..51: mol_type = other DNA
cgtcgttttgtgaatggtcgttttnnkaatgagtcggatacaattgatatt

SEQ ID NO: 1331 - DNA, 51 bp, synthetic construct
  source 1..51: mol_type = other DNA
cgttttgtgaatggtcgttttagtnnkgagtcggatacaattgatattacc

SEQ ID NO: 1332 - DNA, 51 bp, synthetic construct
  source 1..51: mol_type = other DNA
tttgtgaatggtcgttttagtaatnnktcggatacaattgatattaccaag

SEQ ID NO: 1333 - DNA, 51 bp, synthetic construct
  source 1..51: mol_type = other DNA
gtgaatggtcgttttagtaatgagnnkgatacaattgatattaccaaggat

SEQ ID NO: 1334 - DNA, 51 bp, synthetic construct
  source 1..51: mol_type = other DNA
aatggtcgttttagtaatgagtcgnnkacaattgatattaccaaggatatg

SEQ ID NO: 1335 - DNA, 51 bp, synthetic construct
  source 1..51: mol_type = other DNA
ggtcgttttagtaatgagtcggatnnkattgatattaccaaggatatggag

SEQ ID NO: 1336 - DNA, 51 bp, synthetic construct
  source 1..51: mol_type = other DNA
cgttttagtaatgagtcggatacannkgatattaccaaggatatggagaag

SEQ ID NO: 1337 - DNA, 51 bp, synthetic construct
  source 1..51: mol_type = other DNA
tttagtaatgagtcggatacaattnnkattaccaaggatatggagaagact

SEQ ID NO: 1338 - DNA, 51 bp, synthetic construct
  source 1..51: mol_type = other DNA
agtaatgagtcggatacaattgatnnkaccaaggatatggagaagactctg

SEQ ID NO: 1339 - DNA, 51 bp, synthetic construct
  source 1..51: mol_type = other DNA
aatgagtcggatacaattgatattnnkaaggatatggagaagactctggaa

SEQ ID NO: 1340 - DNA, 51 bp, synthetic construct
  source 1..51: mol_type = other DNA
gagtcggatacaattgatattaccnnkgatatggagaagactctggaaatg

SEQ ID NO: 1341 - DNA, 51 bp, synthetic construct
  source 1..51: mol_type = other DNA
tcggatacaattgatattaccaagnnkatggagaagactctggaaatgaca

SEQ ID NO: 1342 - DNA, 51 bp, synthetic construct
  source 1..51: mol_type = other DNA
gatacaattgatattaccaaggatnnkgagaagactctggaaatgacagac

SEQ ID NO: 1343 - DNA, 51 bp, synthetic construct
  source 1..51: mol_type = other DNA
acaattgatattaccaaggatatgnnkaagactctggaaatgacagacatc

SEQ ID NO: 1344 - DNA, 51 bp, synthetic construct
  source 1..51: mol_type = other DNA
attgatattaccaaggatatggagnnkactctggaaatgacagacatcaat

SEQ ID NO: 1345 - DNA, 51 bp, synthetic construct
  source 1..51: mol_type = other DNA
gatattaccaaggatatggagaagnnkctggaaatgacagacatcaattgg

SEQ ID NO: 1346 - DNA, 51 bp, synthetic construct
  source 1..51: mol_type = other DNA
attaccaaggatatggagaagactnnkgaaatgacagacatcaattggcgt

SEQ ID NO: 1347 - DNA, 51 bp, synthetic construct
  source 1..51: mol_type = other DNA
accaaggatatggagaagactctgnnkatgacagacatcaattggcgtgat

SEQ ID NO: 1348 - DNA, 51 bp, synthetic construct
  source 1..51: mol_type = other DNA
aaggatatggagaagactctggaannkacagacatcaattggcgtgatgga

SEQ ID NO: 1349 - DNA, 51 bp, synthetic construct
  source 1..51: mol_type = other DNA
gatatggagaagactctggaaatgnnkgacatcaattggcgtgatggacat

SEQ ID NO: 1350 - DNA, 51 bp, synthetic construct
  source 1..51: mol_type = other DNA
atggagaagactctggaaatgacannkatcaattggcgtgatggacatgat

SEQ ID NO: 1351 - DNA, 51 bp, synthetic construct
  source 1..51: mol_type = other DNA
gagaagactctggaaatgacagacnnkaattggcgtgatggacatgatttg

SEQ ID NO: 1352 - DNA, 51 bp, synthetic construct
  source 1..51: mol_type = other DNA
aagactctggaaatgacagacatcnnktggcgtgatggacatgatttgcgt

SEQ ID NO: 1353 - DNA, 51 bp, synthetic construct
  source 1..51: mol_type = other DNA
actctggaaatgacagacatcaatnnkcgtgatggacatgatttgcgtcag

SEQ ID NO: 1354 - DNA, 51 bp, synthetic construct
  source 1..51: mol_type = other DNA
ctggaaatgacagacatcaattggnnkgatggacatgatttgcgtcaggac

SEQ ID NO: 1355 - DNA, 51 bp, synthetic construct
  source 1..51: mol_type = other DNA
gaaatgacagacatcaattggcgtnnkggacatgatttgcgtcaggacatt

SEQ ID NO: 1356 - DNA, 51 bp, synthetic construct
  source 1..51: mol_type = other DNA
atgacagacatcaattggcgtgatnnkcatgatttgcgtcaggacattatc

SEQ ID NO: 1357 - DNA, 51 bp, synthetic construct
  source 1..51: mol_type = other DNA
acagacatcaattggcgtgatggannkgatttgcgtcaggacattatcgac

SEQ ID NO: 1358 - DNA, 51 bp, synthetic construct
  source 1..51: mol_type = other DNA
gacatcaattggcgtgatggacatnnkttgcgtcaggacattatcgactat

SEQ ID NO: 1359 - DNA, 51 bp, synthetic construct
  source 1..51: mol_type = other DNA
atcaattggcgtgatggacatgatnnkcgtcaggacattatcgactatgag

SEQ ID NO: 1360 - DNA, 51 bp, synthetic construct
  source 1..51: mol_type = other DNA
aattggcgtgatggacatgatttgnnkcaggacattatcgactatgagatt

SEQ ID NO: 1361 - DNA, 51 bp, synthetic construct
  source 1..51: mol_type = other DNA
tggcgtgatggacatgatttgcgtnnkgacattatcgactatgagattgtg

SEQ ID NO: 1362 - DNA, 51 bp, synthetic construct
  source 1..51: mol_type = other DNA
cgtgatggacatgatttgcgtcagnnkattatcgactatgagattgtgcag

SEQ ID NO: 1363 - DNA, 51 bp, synthetic construct
  source 1..51: mol_type = other DNA
gatggacatgatttgcgtcaggacnnkatcgactatgagattgtgcagcat

SEQ ID NO: 1364 - DNA, 51 bp, synthetic construct
  source 1..51: mol_type = other DNA
ggacatgatttgcgtcaggacattnnkgactatgagattgtgcagcatatt

SEQ ID NO: 1365 - DNA, 51 bp, synthetic construct
  source 1..51: mol_type = other DNA
catgatttgcgtcaggacattatcnnktatgagattgtgcagcatattttc

SEQ ID NO: 1366 - DNA, 51 bp, synthetic construct
  source 1..51: mol_type = other DNA
gatttgcgtcaggacattatcgacnnkgagattgtgcagcatattttcgaa

SEQ ID NO: 1367 - DNA, 51 bp, synthetic construct
  source 1..51: mol_type = other DNA
ttgcgtcaggacattatcgactatnnkattgtgcagcatattttcgaaatt

SEQ ID NO: 1368 - DNA, 51 bp, synthetic construct
  source 1..51: mol_type = other DNA
cgtcaggacattatcgactatgagnnkgtgcagcatattttcgaaattttt

SEQ ID NO: 1369 - DNA, 51 bp, synthetic construct
  source 1..51: mol_type = other DNA
caggacattatcgactatgagattnnkcagcatattttcgaaatttttcgc

SEQ ID NO: 1370 - DNA, 51 bp, synthetic construct
  source 1..51: mol_type = other DNA
gacattatcgactatgagattgtgnnkcatattttcgaaatttttcgcctg

SEQ ID NO: 1371 - DNA, 51 bp, synthetic construct
  source 1..51: mol_type = other DNA
attatcgactatgagattgtgcagnnkattttcgaaatttttcgcctgacg

SEQ ID NO: 1372 - DNA, 51 bp, synthetic construct
  source 1..51: mol_type = other DNA
atcgactatgagattgtgcagcatnnkttcgaaatttttcgcctgacggtg

SEQ ID NO: 1373 - DNA, 51 bp, synthetic construct
  source 1..51: mol_type = other DNA
gactatgagattgtgcagcatattnnkgaaatttttcgcctgacggtgcaa

SEQ ID NO: 1374 - DNA, 51 bp, synthetic construct
  source 1..51: mol_type = other DNA
tatgagattgtgcagcatattttcnnkatttttcgcctgacggtgcaaatg

SEQ ID NO: 1375 - DNA, 51 bp, synthetic construct
  source 1..51: mol_type = other DNA
gagattgtgcagcatattttcgaannktttcgcctgacggtgcaaatgcgt

SEQ ID NO: 1376 - DNA, 51 bp, synthetic construct
  source 1..51: mol_type = other DNA
attgtgcagcatattttcgaaattnnkcgcctgacggtgcaaatgcgtaat

SEQ ID NO: 1377 - DNA, 51 bp, synthetic construct
  source 1..51: mol_type = other DNA
gtgcagcatattttcgaaatttttnnkctgacggtgcaaatgcgtaattcc

SEQ ID NO: 1378 - DNA, 51 bp, synthetic construct
  source 1..51: mol_type = other DNA
cagcatattttcgaaatttttcgcnnkacggtgcaaatgcgtaattcctta

SEQ ID NO: 1379 - DNA, 51 bp, synthetic construct
  source 1..51: mol_type = other DNA
catattttcgaaatttttcgcctgnnkgtgcaaatgcgtaattccttaagc

SEQ ID NO: 1380 - DNA, 51 bp, synthetic construct
  source 1..51: mol_type = other DNA
attttcgaaatttttcgcctgacgnnkcaaatgcgtaattccttaagcgaa

SEQ ID NO: 1381 - DNA, 51 bp, synthetic construct
  source 1..51: mol_type = other DNA
ttcgaaatttttcgcctgacggtgnnkatgcgtaattccttaagcgaactg

SEQ ID NO: 1382 - DNA, 51 bp, synthetic construct
  source 1..51: mol_type = other DNA
gaaatttttcgcctgacggtgcaannkcgtaattccttaagcgaactggaa

SEQ ID NO: 1383 - DNA, 51 bp, synthetic construct
  source 1..51: mol_type = other DNA
atttttcgcctgacggtgcaaatgnnkaattccttaagcgaactggaagat

SEQ ID NO: 1384 - DNA, 51 bp, synthetic construct
  source 1..51: mol_type = other DNA
tttcgcctgacggtgcaaatgcgtnnktccttaagcgaactggaagatcgc

SEQ ID NO: 1385 - DNA, 51 bp, synthetic construct
  source 1..51: mol_type = other DNA
cgcctgacggtgcaaatgcgtaatnnkttaagcgaactggaagatcgcgac

SEQ ID NO: 1386 - DNA, 51 bp, synthetic construct
  source 1..51: mol_type = other DNA
ctgacggtgcaaatgcgtaattccnnkagcgaactggaagatcgcgactat

SEQ ID NO: 1387 - DNA, 51 bp, synthetic construct
  source 1..51: mol_type = other DNA
acggtgcaaatgcgtaattccttannkgaactggaagatcgcgactatgac

SEQ ID NO: 1388 - DNA, 51 bp, synthetic construct
  source 1..51: mol_type = other DNA
gtgcaaatgcgtaattccttaagcnnkctggaagatcgcgactatgaccgc

SEQ ID NO: 1389 - DNA, 51 bp, synthetic construct
  source 1..51: mol_type = other DNA
caaatgcgtaattccttaagcgaannkgaagatcgcgactatgaccgctta

SEQ ID NO: 1390 - DNA, 51 bp, synthetic construct
  source 1..51: mol_type = other DNA
atgcgtaattccttaagcgaactgnnkgatcgcgactatgaccgcttaatt

SEQ ID NO: 1391 - DNA, 51 bp, synthetic construct
  source 1..51: mol_type = other DNA
cgtaattccttaagcgaactggaannkcgcgactatgaccgcttaatttct

SEQ ID NO: 1392 - DNA, 51 bp, synthetic construct
  source 1..51: mol_type = other DNA
aattccttaagcgaactggaagatnnkgactatgaccgcttaatttctcct

SEQ ID NO: 1393 - DNA, 51 bp, synthetic construct
  source 1..51: mol_type = other DNA
tccttaagcgaactggaagatcgcnnktatgaccgcttaatttctcctgtg

SEQ ID NO: 1394 - DNA, 51 bp, synthetic construct
  source 1..51: mol_type = other DNA
ttaagcgaactggaagatcgcgacnnkgaccgcttaatttctcctgtgctg

SEQ ID NO: 1395 - DNA, 51 bp, synthetic construct
  source 1..51: mol_type = other DNA
agcgaactggaagatcgcgactatnnkcgcttaatttctcctgtgctgaat

SEQ ID NO: 1396 - DNA, 51 bp, synthetic construct
  source 1..51: mol_type = other DNA
gaactggaagatcgcgactatgacnnkttaatttctcctgtgctgaatgag

SEQ ID NO: 1397 - DNA, 51 bp, synthetic construct
  source 1..51: mol_type = other DNA
ctggaagatcgcgactatgaccgcnnkatttctcctgtgctgaatgagaac

SEQ ID NO: 1398 - DNA, 51 bp, synthetic construct
  source 1..51: mol_type = other DNA
gaagatcgcgactatgaccgcttannktctcctgtgctgaatgagaacaac

SEQ ID NO: 1399 - DNA, 51 bp, synthetic construct
  source 1..51: mol_type = other DNA
gatcgcgactatgaccgcttaattnnkcctgtgctgaatgagaacaacatc

SEQ ID NO: 1400 - DNA, 51 bp, synthetic construct
  source 1..51: mol_type = other DNA
cgcgactatgaccgcttaatttctnnkgtgctgaatgagaacaacatcttc

SEQ ID NO: 1401 - DNA, 51 bp, synthetic construct
  source 1..51: mol_type = other DNA
gactatgaccgcttaatttctcctnnkctgaatgagaacaacatcttctat

SEQ ID NO: 1402 - DNA, 51 bp, synthetic construct
  source 1..51: mol_type = other DNA
tatgaccgcttaatttctcctgtgnnkaatgagaacaacatcttctatgac

SEQ ID NO: 1403 - DNA, 51 bp, synthetic construct
  source 1..51: mol_type = other DNA
gaccgcttaatttctcctgtgctgnnkgagaacaacatcttctatgactca

SEQ ID NO: 1404 - DNA, 51 bp, synthetic construct
  source 1..51: mol_type = other DNA
cgcttaatttctcctgtgctgaatnnkaacaacatcttctatgactcagcg

SEQ ID NO: 1405 - DNA, 51 bp, synthetic construct
  source 1..51: mol_type = other DNA
ttaatttctcctgtgctgaatgagnnkaacatcttctatgactcagcgaaa

SEQ ID NO: 1406 - DNA, 51 bp, synthetic construct
  source 1..51: mol_type = other DNA
atttctcctgtgctgaatgagaacnnkatcttctatgactcagcgaaagcc

SEQ ID NO: 1407 - DNA, 51 bp, synthetic construct
  source 1..51: mol_type = other DNA
tctcctgtgctgaatgagaacaacnnkttctatgactcagcgaaagccggg

SEQ ID NO: 1408 - DNA, 51 bp, synthetic construct
  source 1..51: mol_type = other DNA
cctgtgctgaatgagaacaacatcnnktatgactcagcgaaagccggggac

SEQ ID NO: 1409 - DNA, 51 bp, synthetic construct
  source 1..51: mol_type = other DNA
gtgctgaatgagaacaacatcttcnnkgactcagcgaaagccggggacgct

SEQ ID NO: 1410 - DNA, 51 bp, synthetic construct
  source 1..51: mol_type = other DNA
ctgaatgagaacaacatcttctatnnktcagcgaaagccggggacgctttg

SEQ ID NO: 1411 - DNA, 51 bp, synthetic construct
  source 1..51: mol_type = other DNA
aatgagaacaacatcttctatgacnnkgcgaaagccggggacgctttgcca

SEQ ID NO: 1412 - DNA, 51 bp, synthetic construct
  source 1..51: mol_type = other DNA
gagaacaacatcttctatgactcannkaaagccggggacgctttgccaaag

SEQ ID NO: 1413 - DNA, 51 bp, synthetic construct
  source 1..51: mol_type = other DNA
aacaacatcttctatgactcagcgnnkgccggggacgctttgccaaaggat

SEQ ID NO: 1414 - DNA, 51 bp, synthetic construct
  source 1..51: mol_type = other DNA
aacatcttctatgactcagcgaaannkggggacgctttgccaaaggatgca

SEQ ID NO: 1415 - DNA, 51 bp, synthetic construct
  source 1..51: mol_type = other DNA
atcttctatgactcagcgaaagccnnkgacgctttgccaaaggatgcagat

SEQ ID NO: 1416 - DNA, 51 bp, synthetic construct
  source 1..51: mol_type = other DNA
ttctatgactcagcgaaagccgggnnkgctttgccaaaggatgcagatgct

SEQ ID NO: 1417 - DNA, 51 bp, synthetic construct
  source 1..51: mol_type = other DNA
tatgactcagcgaaagccggggacnnkttgccaaaggatgcagatgctaac

SEQ ID NO: 1418 - DNA, 51 bp, synthetic construct
  source 1..51: mol_type = other DNA
gactcagcgaaagccggggacgctnnkccaaaggatgcagatgctaacggt

SEQ ID NO: 1419 - DNA, 51 bp, synthetic construct
  source 1..51: mol_type = other DNA
tcagcgaaagccggggacgctttgnnkaaggatgcagatgctaacggtgca

SEQ ID NO: 1420 - DNA, 51 bp, synthetic construct
  source 1..51: mol_type = other DNA
gcgaaagccggggacgctttgccannkgatgcagatgctaacggtgcatat

SEQ ID NO: 1421 - DNA, 51 bp, synthetic construct
  source 1..51: mol_type = other DNA
aaagccggggacgctttgccaaagnnkgcagatgctaacggtgcatattgt

SEQ ID NO: 1422 - DNA, 51 bp, synthetic construct
  source 1..51: mol_type = other DNA
gccggggacgctttgccaaaggatnnkgatgctaacggtgcatattgtatt

SEQ ID NO: 1423 - DNA, 51 bp, synthetic construct
  source 1..51: mol_type = other DNA
ggggacgctttgccaaaggatgcannkgctaacggtgcatattgtattgct

SEQ ID NO: 1424 - DNA, 51 bp, synthetic construct
  source 1..51: mol_type = other DNA
gacgctttgccaaaggatgcagatnnkaacggtgcatattgtattgctctg

SEQ ID NO: 1425 - DNA, 51 bp, synthetic construct
  source 1..51: mol_type = other DNA
gctttgccaaaggatgcagatgctnnkggtgcatattgtattgctctgaaa

SEQ ID NO: 1426 - DNA, 51 bp, synthetic construct
  source 1..51: mol_type = other DNA
ttgccaaaggatgcagatgctaacnnkgcatattgtattgctctgaaaggc

SEQ ID NO: 1427 - DNA, 51 bp, synthetic construct
  source 1..51: mol_type = other DNA
ccaaaggatgcagatgctaacggtnnktattgtattgctctgaaaggcctt

SEQ ID NO: 1428 - DNA, 51 bp, synthetic construct
  source 1..51: mol_type = other DNA
aaggatgcagatgctaacggtgcannktgtattgctctgaaaggcctttac

SEQ ID NO: 1429 - DNA, 51 bp, synthetic construct
  source 1..51: mol_type = other DNA
gatgcagatgctaacggtgcatatnnkattgctctgaaaggcctttacgag

SEQ ID NO: 1430 - DNA, 51 bp, synthetic construct
  source 1..51: mol_type = other DNA
gcagatgctaacggtgcatattgtnnkgctctgaaaggcctttacgagatc

SEQ ID NO: 1431 - DNA, 51 bp, synthetic construct
  source 1..51: mol_type = other DNA
gatgctaacggtgcatattgtattnnkctgaaaggcctttacgagatcaaa

SEQ ID NO: 1432 - DNA, 51 bp, synthetic construct
  source 1..51: mol_type = other DNA
gctaacggtgcatattgtattgctnnkaaaggcctttacgagatcaaacaa

SEQ ID NO: 1433 - DNA, 51 bp, synthetic construct
  source 1..51: mol_type = other DNA
aacggtgcatattgtattgctctgnnkggcctttacgagatcaaacaaatt

SEQ ID NO: 1434 - DNA, 51 bp, synthetic construct
  source 1..51: mol_type = other DNA
ggtgcatattgtattgctctgaaannkctttacgagatcaaacaaattact

SEQ ID NO: 1435 - DNA, 51 bp, synthetic construct
  source 1..51: mol_type = other DNA
gcatattgtattgctctgaaaggcnnktacgagatcaaacaaattactgaa

SEQ ID NO: 1436 - DNA, 51 bp, synthetic construct
  source 1..51: mol_type = other DNA
tattgtattgctctgaaaggccttnnkgagatcaaacaaattactgaaaac

SEQ ID NO: 1437 - DNA, 51 bp, synthetic construct
  source 1..51: mol_type = other DNA
tgtattgctctgaaaggcctttacnnkatcaaacaaattactgaaaactgg

SEQ ID NO: 1438 - DNA, 51 bp, synthetic construct
  source 1..51: mol_type = other DNA
attgctctgaaaggcctttacgagnnkaaacaaattactgaaaactggaag

SEQ ID NO: 1439 - DNA, 51 bp, synthetic construct
  source 1..51: mol_type = other DNA
gctctgaaaggcctttacgagatcnnkcaaattactgaaaactggaaggaa

SEQ ID NO: 1440 - DNA, 51 bp, synthetic construct
  source 1..51: mol_type = other DNA
ctgaaaggcctttacgagatcaaannkattactgaaaactggaaggaagat

SEQ ID NO: 1441 - DNA, 51 bp, synthetic construct
  source 1..51: mol_type = other DNA
aaaggcctttacgagatcaaacaannkactgaaaactggaaggaagatgga

SEQ ID NO: 1442 - DNA, 51 bp, synthetic construct
  source 1..51: mol_type = other DNA
ggcctttacgagatcaaacaaattnnkgaaaactggaaggaagatggaaag

SEQ ID NO: 1443 - DNA, 51 bp, synthetic construct
  source 1..51: mol_type = other DNA
ctttacgagatcaaacaaattactnnkaactggaaggaagatggaaagttt

SEQ ID NO: 1444 - DNA, 51 bp, synthetic construct
  source 1..51: mol_type = other DNA
tacgagatcaaacaaattactgaannktggaaggaagatggaaagttttcc

SEQ ID NO: 1445 - DNA, 51 bp, synthetic construct
  source 1..51: mol_type = other DNA
gagatcaaacaaattactgaaaacnnkaaggaagatggaaagttttcccgt

SEQ ID NO: 1446 - DNA, 51 bp, synthetic construct
  source 1..51: mol_type = other DNA
atcaaacaaattactgaaaactggnnkgaagatggaaagttttcccgtgat

SEQ ID NO: 1447 - DNA, 51 bp, synthetic construct
  source 1..51: mol_type = other DNA
aaacaaattactgaaaactggaagnnkgatggaaagttttcccgtgataaa

SEQ ID NO: 1448 - DNA, 51 bp, synthetic construct
  source 1..51: mol_type = other DNA
caaattactgaaaactggaaggaannkggaaagttttcccgtgataaattg

SEQ ID NO: 1449 - DNA, 51 bp, synthetic construct
  source 1..51: mol_type = other DNA
attactgaaaactggaaggaagatnnkaagttttcccgtgataaattgaag

SEQ ID NO: 1450 - DNA, 51 bp, synthetic construct
  source 1..51: mol_type = other DNA
actgaaaactggaaggaagatggannkttttcccgtgataaattgaagatc

SEQ ID NO: 1451 - DNA, 51 bp, synthetic construct
  source 1..51: mol_type = other DNA
gaaaactggaaggaagatggaaagnnktcccgtgataaattgaagatctct

SEQ ID NO: 1452 - DNA, 51 bp, synthetic construct
  source 1..51: mol_type = other DNA
aactggaaggaagatggaaagtttnnkcgtgataaattgaagatctctaat

SEQ ID NO: 1453 - DNA, 51 bp, synthetic construct
  source 1..51: mol_type = other DNA
tggaaggaagatggaaagttttccnnkgataaattgaagatctctaataag

SEQ ID NO: 1454 - DNA, 51 bp, synthetic construct
  source 1..51: mol_type = other DNA
aaggaagatggaaagttttcccgtnnkaaattgaagatctctaataaggac

SEQ ID NO: 1455 - DNA, 51 bp, synthetic construct
  source 1..51: mol_type = other DNA
gaagatggaaagttttcccgtgatnnkttgaagatctctaataaggactgg

SEQ ID NO: 1456 - DNA, 51 bp, synthetic construct
  source 1..51: mol_type = other DNA
gatggaaagttttcccgtgataaannkaagatctctaataaggactggttt

SEQ ID NO: 1457 - DNA, 51 bp, synthetic construct
  source 1..51: mol_type = other DNA
ggaaagttttcccgtgataaattgnnkatctctaataaggactggtttgac

SEQ ID NO: 1458 - DNA, 51 bp, synthetic construct
  source 1..51: mol_type = other DNA
aagttttcccgtgataaattgaagnnktctaataaggactggtttgacttt

SEQ ID NO: 1459 - DNA, 51 bp, synthetic construct
  source 1..51: mol_type = other DNA
ttttcccgtgataaattgaagatcnnkaataaggactggtttgactttatc

SEQ ID NO: 1460 - DNA, 51 bp, synthetic construct
  source 1..51: mol_type = other DNA
tcccgtgataaattgaagatctctnnkaaggactggtttgactttatccaa

SEQ ID NO: 1461 - DNA, 51 bp, synthetic construct
  source 1..51: mol_type = other DNA
cgtgataaattgaagatctctaatnnkgactggtttgactttatccaaaat

SEQ ID NO: 1462 - DNA, 51 bp, synthetic construct
  source 1..51: mol_type = other DNA
gataaattgaagatctctaataagnnktggtttgactttatccaaaataaa

SEQ ID NO: 1463 - DNA, 51 bp, synthetic construct
  source 1..51: mol_type = other DNA
aaattgaagatctctaataaggacnnktttgactttatccaaaataaacgt

SEQ ID NO: 1464 - DNA, 51 bp, synthetic construct
  source 1..51: mol_type = other DNA
ttgaagatctctaataaggactggnnkgactttatccaaaataaacgttat

SEQ ID NO: 1465 - DNA, 51 bp, synthetic construct
  source 1..51: mol_type = other DNA
aagatctctaataaggactggtttnnktttatccaaaataaacgttattta

SEQ ID NO: 1466 - DNA, 51 bp, synthetic construct
  source 1..51: mol_type = other DNA
atctctaataaggactggtttgacnnkatccaaaataaacgttatttaggt

SEQ ID NO: 1467 - DNA, 51 bp, synthetic construct
  source 1..51: mol_type = other DNA
tctaataaggactggtttgactttnnkcaaaataaacgttatttaggtcgt

SEQ ID NO: 1468 - DNA, 51 bp, synthetic construct
  source 1..51: mol_type = other DNA
aataaggactggtttgactttatcnnkaataaacgttatttaggtcgtagc

SEQ ID NO: 1469 - DNA, 51 bp, synthetic construct
  source 1..51: mol_type = other DNA
aaggactggtttgactttatccaannkaaacgttatttaggtcgtagcagt

SEQ ID NO: 1470 - DNA, 51 bp, synthetic construct
  source 1..51: mol_type = other DNA
gactggtttgactttatccaaaatnnkcgttatttaggtcgtagcagtgat

SEQ ID NO: 1471 - DNA, 51 bp, synthetic construct
  source 1..51: mol_type = other DNA
tggtttgactttatccaaaataaannktatttaggtcgtagcagtgatgat

SEQ ID NO: 1472 - DNA, 51 bp, synthetic construct
  source 1..51: mol_type = other DNA
tttgactttatccaaaataaacgtnnkttaggtcgtagcagtgatgatgaa

SEQ ID NO: 1473 - DNA, 51 bp, synthetic construct
  source 1..51: mol_type = other DNA
gactttatccaaaataaacgttatnnkggtcgtagcagtgatgatgaagca

SEQ ID NO: 1474 - DNA, 52 bp, synthetic construct
  source 1..52: mol_type = other DNA
actgagacaacacagcagttcctggttaaaaacggcatcattaaagaagatg

SEQ ID NO: 1475 - DNA, 52 bp, synthetic construct
  source 1..52: mol_type = other DNA
catcttctttaatgatgccgtttttaaccaggaactgctgtgttgtctcagt

SEQ ID NO: 1476 - DNA, 49 bp, synthetic construct
  source 1..49: mol_type = other DNA
cacagcagttcatcgttaaaaaccagatcattaaagaagatgagctgcg

SEQ ID NO: 1477 - DNA, 49 bp, synthetic construct
  source 1..49: mol_type = other DNA
cgcagctcatcttctttaatgatctggtttttaacgatgaactgctgtg

SEQ ID NO: 1478 - DNA, 45 bp, synthetic construct
  source 1..45: mol_type = other DNA
cagttcatcgttaaaaacggccagattaaagaagatgagctgcgc

SEQ ID NO: 1479 - DNA, 45 bp, synthetic construct
  source 1..45: mol_type = other DNA
gcgcagctcatcttctttaatctggccgtttttaacgatgaactg

SEQ ID NO: 1480 - DNA, 46 bp, synthetic construct
  source 1..46: mol_type = other DNA
acgccttccattggtgcaaagtgtttatgacagaggagttagtaga

SEQ ID NO: 1481 - DNA, 46 bp, synthetic construct
  source 1..46: mol_type = other DNA
tctactaactcctctgtcataaacactttgcaccaatggaaggcgt

SEQ ID NO: 1482 - DNA, 51 bp, synthetic construct
  source 1..51: mol_type = other DNA
gatttcactgtataacttagtccgtaatagcgtcactcagaagccgtactc

SEQ ID NO: 1483 - DNA, 51 bp, synthetic construct
  source 1..51: mol_type = other DNA
gagtacggcttctgagtgacgctattacggactaagttatacagtgaaatc

SEQ ID NO: 1484 - DNA, 50 bp, synthetic construct
  source 1..50: mol_type = other DNA
tcagaagccgtactcaactccgaagatcaagttaaattttggaattccga

SEQ ID NO: 1485 - DNA, 50 bp, synthetic construct
  source 1..50: mol_type = other DNA
tcggaattccaaaatttaacttgatcttcggagttgagtacggcttctga

SEQ ID NO: 1486 - DNA, 44 bp, synthetic construct
  source 1..44: mol_type = other DNA
gtcaccacgaagcagcatttaacattgtgaaagactatcgctac

SEQ ID NO: 1487 - DNA, 44 bp, synthetic construct
  source 1..44: mol_type = other DNA
gtagcgatagtctttcacaatgttaaatgctgcttcgtggtgac

SEQ ID NO: 1488 - DNA, 60 bp, synthetic construct
  source 1..60: mol_type = other DNA
agcaaaagtcttttaatatcgttaatggtgtggactaccaaattaagcttaaacaacagg

SEQ ID NO: 1489 - DNA, 60 bp, synthetic construct
  source 1..60: mol_type = other DNA
cctgttgtttaagcttaatttggtagtccacaccattaacgatattaaaagacttttgct

SEQ ID NO: 1490 - RNA, 42 nt, synthetic construct
  source 1..42: mol_type = other RNA
ttaatttctactcttgtagatcttgggtgtgttaaaagtgac

SEQ ID NO: 1491 - RNA, 42 nt, synthetic construct
  source 1..42: mol_type = other RNA
ttaatttctactcttgtagatatccgtgctgagtgtaccatg

SEQ ID NO: 1492 - RNA, 42 nt, synthetic construct
  source 1..42: mol_type = other RNA
ttaatttctactcttgtagattaatgccctgtagtctctctg

SEQ ID NO: 1493 - RNA, 42 nt, synthetic construct
  source 1..42: mol_type = other RNA
ttaatttctactcttgtagattaattaacagcttgctggtga

SEQ ID NO: 1494 - RNA, 42 nt, synthetic construct
  source 1..42: mol_type = other RNA
ttaatttctactcttgtagattgtgaaatggcttataattgc

SEQ ID NO: 1495 - RNA, 42 nt, synthetic construct
  source 1..42: mol_type = other RNA
ttaatttctactcttgtagatttgtaggatatgcccttgact

SEQ ID NO: 1496 - DNA, 27 bp, synthetic construct
  source 1..27: mol_type = other DNA
aagaatgttgtgataaaaggtgatgct

SEQ ID NO: 1497 - DNA, 24 bp, synthetic construct
  source 1..24: mol_type = other DNA
acacatccatgggacttctgcctc

SEQ ID NO: 1498 - DNA, 39 bp, synthetic construct
  source 1..39: mol_type = other DNA
atcggcatcagcagcctggtgaaaaccctgcggaacgct

SEQ ID NO: 1499 - DNA, 39 bp, synthetic construct
  source 1..39: mol_type = other DNA
agcgttccgcagggttttcaccaggctgctgatgccgat

SEQ ID NO: 1500 - DNA, 47 bp, synthetic construct
  source 1..47: mol_type = other DNA
cgagaaccggcagatcctgaagcggatcatggacgactactaccggg

SEQ ID NO: 1501 - DNA, 47 bp, synthetic construct
  source 1..47: mol_type = other DNA
cccggtagtagtcgtccatgatccgcttcaggatctgccggttctcg

SEQ ID NO: 1502 - DNA, 47 bp, synthetic construct
  source 1..47: mol_type = other DNA
gcagatcctgaaggacatcatggccgactactaccggggcttcatca

SEQ ID NO: 1503 - DNA, 47 bp, synthetic construct
  source 1..47: mol_type = other DNA
tgatgaagccccggtagtagtcggccatgatgtccttcaggatctgc

SEQ ID NO: 1504 - DNA, 49 bp, synthetic construct
  source 1..49: mol_type = other DNA
agaaaacccaagtcatcaagctgttcggcagattcgccaccagcttcaa

SEQ ID NO: 1505 - DNA, 49 bp, synthetic construct
  source 1..49: mol_type = other DNA
ttgaagctggtggcgaatctgccgaacagcttgatgacttgggttttct

SEQ ID NO: 1506 - DNA, 47 bp, synthetic construct
  source 1..47: mol_type = other DNA
gcagattcgccaccagcttctacgactacttcaagaaccgggccaac

SEQ ID NO: 1507 - DNA, 47 bp, synthetic construct
  source 1..47: mol_type = other DNA
gttggcccggttcttgaagtagtcgtagaagctggtggcgaatctgc

SEQ ID NO: 1508 - DNA, 42 bp, synthetic construct
  source 1..42: mol_type = other DNA
gccaactgcttcagcgcccgggatatcagcagcagctcctgc

SEQ ID NO: 1509 - DNA, 42 bp, synthetic construct
  source 1..42: mol_type = other DNA
gcaggagctgctgctgatatcccgggcgctgaagcagttggc

SEQ ID NO: 1510 - DNA, 41 bp, synthetic construct
  source 1..41: mol_type = other DNA
gcttcagcgccgacgatatcgtgagcagctcctgccacaga

SEQ ID NO: 1511 - DNA, 41 bp, synthetic construct
  source 1..41: mol_type = other DNA
tctgtggcaggagctgctcacgatatcgtcggcgctgaagc

SEQ ID NO: 1512 - DNA, 48 bp, synthetic construct
  source 1..48: mol_type = other DNA
gctgcacaagcagattctgtgtatcaaggacacctcctacgaggtgcc

SEQ ID NO: 1513 - DNA, 48 bp, synthetic construct
  source 1..48: mol_type = other DNA
ggcacctcgtaggaggtgtccttgatacacagaatctgcttgtgcagc

SEQ ID NO: 1514 - DNA, 44 bp, synthetic construct
  source 1..44: mol_type = other DNA
tcgccgacacctcctacgagcggccctacaagttcgagagcgac

SEQ ID NO: 1515 - DNA, 44 bp, synthetic construct
  source 1..44: mol_type = other DNA
gtcgctctcgaacttgtagggccgctcgtaggaggtgtcggcga

SEQ ID NO: 1516 - DNA, 47 bp, synthetic construct
  source 1..47: mol_type = other DNA
ccgacacctcctacgaggtggtgtacaagttcgagagcgacgaagag

SEQ ID NO: 1517 - DNA, 47 bp, synthetic construct
  source 1..47: mol_type = other DNA
ctcttcgtcgctctcgaacttgtacaccacctcgtaggaggtgtcgg

SEQ ID NO: 1518 - DNA, 47 bp, synthetic construct
  source 1..47: mol_type = other DNA
ccgacacctcctacgaggtgcggtacaagttcgagagcgacgaagag

SEQ ID NO: 1519 - DNA, 47 bp, synthetic construct
  source 1..47: mol_type = other DNA
ctcttcgtcgctctcgaacttgtaccgcacctcgtaggaggtgtcgg

SEQ ID NO: 1520 - DNA, 44 bp, synthetic construct
  source 1..44: mol_type = other DNA
cacctcctacgaggtgccccggaagttcgagagcgacgaagagg

SEQ ID NO: 1521 - DNA, 44 bp, synthetic construct
  source 1..44: mol_type = other DNA
cctcttcgtcgctctcgaacttccggggcacctcgtaggaggtg

SEQ ID NO: 1522 - DNA, 44 bp, synthetic construct
  source 1..44: mol_type = other DNA
gtgccctacaagttcgagagccgggaagaggtgtaccagagcgt

SEQ ID NO: 1523 - DNA, 44 bp, synthetic construct
  source 1..44: mol_type = other DNA
acgctctggtacacctcttcccggctctcgaacttgtagggcac

SEQ ID NO: 1524 - DNA, 44 bp, synthetic construct
  source 1..44: mol_type = other DNA
cctacaagttcgagagcgacgaaaaggtgtaccagagcgtgaac

SEQ ID NO: 1525 - DNA, 44 bp, synthetic construct
  source 1..44: mol_type = other DNA
gttcacgctctggtacaccttttcgtcgctctcgaacttgtagg

SEQ ID NO: 1526 - DNA, 42 bp, synthetic construct
  source 1..42: mol_type = other DNA
ttcgagagcgacgaagaggtgaagcagagcgtgaacggcttc

SEQ ID NO: 1527 - DNA, 42 bp, synthetic construct
  source 1..42: mol_type = other DNA
gaagccgttcacgctctgcttcacctcttcgtcgctctcgaa

SEQ ID NO: 1528 - DNA, 47 bp, synthetic construct
  source 1..47: mol_type = other DNA
aagttctacgagagcgtgtcccggaaaacctacagagactgggagac

SEQ ID NO: 1529 - DNA, 47 bp, synthetic construct
  source 1..47: mol_type = other DNA
gtctcccagtctctgtaggttttccgggacacgctctcgtagaactt

SEQ ID NO: 1530 - DNA, 41 bp, synthetic construct
  source 1..41: mol_type = other DNA
tggacgtgatcatgaacgcccggcactggtgcagcgtgttc

SEQ ID NO: 1531 - DNA, 41 bp, synthetic construct
  source 1..41: mol_type = other DNA
gaacacgctgcaccagtgccgggcgttcatgatcacgtcca

SEQ ID NO: 1532 - DNA, 42 bp, synthetic construct
  source 1..42: mol_type = other DNA
gccttccactggtgcagcaagttcatgaccgaggaactggtg

SEQ ID NO: 1533 - DNA, 42 bp, synthetic construct
  source 1..42: mol_type = other DNA
caccagttcctcggtcatgaacttgctgcaccagtggaaggc

SEQ ID NO: 1534 - DNA, 42 bp, synthetic construct
  source 1..42: mol_type = other DNA
gtacaacctcgtgcggaaccgggtgacccagaagccttacag

SEQ ID NO: 1535 - DNA, 42 bp, synthetic construct
  source 1..42: mol_type = other DNA
ctgtaaggcttctgggtcacccggttccgcacgaggttgtac

SEQ ID NO: 1536 - DNA, 47 bp, synthetic construct
  source 1..47: mol_type = other DNA
cggaactacgtgacccagaaggtgtacagcaccaagaagatcaagct

SEQ ID NO: 1537 - DNA, 47 bp, synthetic construct
  source 1..47: mol_type = other DNA
agcttgatcttcttggtgctgtacaccttctgggtcacgtagttccg

SEQ ID NO: 1538 - DNA, 43 bp, synthetic construct
  source 1..43: mol_type = other DNA
ctacgtgacccagaagcctcggagcaccaagaagatcaagctg

SEQ ID NO: 1539 - DNA, 43 bp, synthetic construct
  source 1..43: mol_type = other DNA
cagcttgatcttcttggtgctccgaggcttctgggtcacgtag

SEQ ID NO: 1540 - DNA, 49 bp, synthetic construct
  source 1..49: mol_type = other DNA
ctacgtgacccagaagccttaccggaccaagaagatcaagctgaacttc

SEQ ID NO: 1541 - DNA, 49 bp, synthetic construct
  source 1..49: mol_type = other DNA
gaagttcagcttgatcttcttggtccggtaaggcttctgggtcacgtag

SEQ ID NO: 1542 - DNA, 44 bp, synthetic construct
  source 1..44: mol_type = other DNA
cccagaagccttacagcacccggaagatcaagctgaacttcggc

SEQ ID NO: 1543 - DNA, 44 bp, synthetic construct
  source 1..44: mol_type = other DNA
gccgaagttcagcttgatcttccgggtgctgtaaggcttctggg

SEQ ID NO: 1544 - DNA, 47 bp, synthetic construct
  source 1..47: mol_type = other DNA
gcgggacaatctgtactacctgatgatcttcaacgccaagaacaagc

SEQ ID NO: 1545 - DNA, 47 bp, synthetic construct
  source 1..47: mol_type = other DNA
gcttgttcttggcgttgaagatcatcaggtagtacagattgtcccgc

SEQ ID NO: 1546 - DNA, 47 bp, synthetic construct
  source 1..47: mol_type = other DNA
aagagcaaagagtacagcaacaacgtgatcatcctgatgcgggacaa

SEQ ID NO: 1547 - DNA, 47 bp, synthetic construct
  source 1..47: mol_type = other DNA
ttgtcccgcatcaggatgatcacgttgttgctgtactctttgctctt

SEQ ID NO: 1548 - DNA, 46 bp, synthetic construct
  source 1..46: mol_type = other DNA
tcaacgccaagaacaagcccaagaagaagattatcgagggcaacac

SEQ ID NO: 1549 - DNA, 46 bp, synthetic construct
  source 1..46: mol_type = other DNA
gtgttgccctcgataatcttcttcttgggcttgttcttggcgttga

SEQ ID NO: 1550 - DNA, 42 bp, synthetic construct
  source 1..42: mol_type = other DNA
ggcgactacaagaagatgatctatgtgctgctgcctgggccg

SEQ ID NO: 1551 - DNA, 42 bp, synthetic construct
  source 1..42: mol_type = other DNA
cggcccaggcagcagcacatagatcatcttcttgtagtcgcc

SEQ ID NO: 1552 - DNA, 50 bp, synthetic construct
  source 1..50: mol_type = other DNA
gcgactacaagaagatgatctataacctgaagcctgggccgaacaagatg

SEQ ID NO: 1553 - DNA, 50 bp, synthetic construct
  source 1..50: mol_type = other DNA
catcttgttcggcccaggcttcaggttatagatcatcttcttgtagtcgc

SEQ ID NO: 1554 - DNA, 44 bp, synthetic construct
  source 1..44: mol_type = other DNA
ccatccatccagagtggaagaatcggggcttcgacttcagcgac

SEQ ID NO: 1555 - DNA, 44 bp, synthetic construct
  source 1..44: mol_type = other DNA
gtcgctgaagtcgaagccccgattcttccactctggatggatgg

SEQ ID NO: 1556 - DNA, 47 bp, synthetic construct
  source 1..47: mol_type = other DNA
cagatctacaacaaagacttcagcaagcggtccaccggcaacgacaa

SEQ ID NO: 1557 - DNA, 47 bp, synthetic construct
  source 1..47: mol_type = other DNA
ttgtcgttgccggtggaccgcttgctgaagtctttgttgtagatctg

SEQ ID NO: 1558 - DNA, 42 bp, synthetic construct
  source 1..42: mol_type = other DNA
agcaagaagtccaccggccgggacaacctgcacaccatgtac

SEQ ID NO: 1559 - DNA, 42 bp, synthetic construct
  source 1..42: mol_type = other DNA
gtacatggtgtgcaggttgtcccggccggtggacttcttgct

SEQ ID NO: 1560 - DNA, 48 bp, synthetic construct
  source 1..48: mol_type = other DNA
ctgaagctgaacggcgagaacgagatttttttcagaaagtccagcatc

SEQ ID NO: 1561 - DNA, 48 bp, synthetic construct
  source 1..48: mol_type = other DNA
gatgctggactttctgaaaaaaatctcgttctcgccgttcagcttcag

SEQ ID NO: 1562 - DNA, 48 bp, synthetic construct
  source 1..48: mol_type = other DNA
ctgaagctgaacggcgagaccgagatttttttcagaaagtccagcatc

SEQ ID NO: 1563 - DNA, 48 bp, synthetic construct
  source 1..48: mol_type = other DNA
gatgctggactttctgaaaaaaatctcggtctcgccgttcagcttcag

SEQ ID NO: 1564 - DNA, 44 bp, synthetic construct
  source 1..44: mol_type = other DNA
cggcgaggccgagatttttgccagaaagtccagcatcaagaacc

SEQ ID NO: 1565 - DNA, 44 bp, synthetic construct
  source 1..44: mol_type = other DNA
ggttcttgatgctggactttctggcaaaaatctcggcctcgccg

SEQ ID NO: 1566 - DNA, 48 bp, synthetic construct
  source 1..48: mol_type = other DNA
cgaggccgagatttttttcagaaaggccagcatcaagaaccccatcat

SEQ ID NO: 1567 - DNA, 48 bp, synthetic construct
  source 1..48: mol_type = other DNA
atgatggggttcttgatgctggcctttctgaaaaaaatctcggcctcg

SEQ ID NO: 1568 - DNA, 43 bp, synthetic construct
  source 1..43: mol_type = other DNA
agtccagcatcaagaaccccaagatccacaaaaagggcagcat

SEQ ID NO: 1569 - DNA, 43 bp, synthetic construct
  source 1..43: mol_type = other DNA
atgctgccctttttgtggatcttggggttcttgatgctggact

SEQ ID NO: 1570 - DNA, 47 bp, synthetic construct
  source 1..47: mol_type = other DNA
catcctggtcaaccggacataccgggccgaagagaaggatcagttcg

SEQ ID NO: 1571 - DNA, 47 bp, synthetic construct
  source 1..47: mol_type = other DNA
cgaactgatccttctcttcggcccggtatgtccggttgaccaggatg

SEQ ID NO: 1572 - DNA, 40 bp, synthetic construct
  source 1..40: mol_type = other DNA
caccacgaagccgccaagaatatcgtgaaggactaccggt

SEQ ID NO: 1573 - DNA, 40 bp, synthetic construct
  source 1..40: mol_type = other DNA
accggtagtccttcacgatattcttggcggcttcgtggtg

SEQ ID NO: 1574 - DNA, 60 bp, synthetic construct
  source 1..60: mol_type = other DNA
actatcgctacacttacgataagtacctgttacatatgcctattacgattaactttaagg

SEQ ID NO: 1575 - DNA, 60 bp, synthetic construct
  source 1..60: mol_type = other DNA
ccttaaagttaatcgtaataggcatatgtaacaggtacttatcgtaagtgtagcgatagt

SEQ ID NO: 1576 - DNA, 47 bp, synthetic construct
  source 1..47: mol_type = other DNA
ggaaagagatcggcaagatcaaacggatcaaagagggctacctgagc

SEQ ID NO: 1577 - DNA, 47 bp, synthetic construct
  source 1..47: mol_type = other DNA
gctcaggtagccctctttgatccgtttgatcttgccgatctctttcc

SEQ ID NO: 1578 - DNA, 47 bp, synthetic construct
  source 1..47: mol_type = other DNA
gaaagagatcggcaagatcaaagaacggaaagagggctacctgagcc

SEQ ID NO: 1579 - DNA, 47 bp, synthetic construct
  source 1..47: mol_type = other DNA
ggctcaggtagccctctttccgttctttgatcttgccgatctctttc

SEQ ID NO: 1580 - DNA, 41 bp, synthetic construct
  source 1..41: mol_type = other DNA
ctgacctacattcccgacgtgctgaaaaacgtgggccacca

SEQ ID NO: 1581 - DNA, 41 bp, synthetic construct
  source 1..41: mol_type = other DNA
tggtggcccacgtttttcagcacgtcgggaatgtaggtcag

SEQ ID NO: 1582 - DNA, 41 bp, synthetic construct
  source 1..41: mol_type = other DNA
gccctacaagttcgagagctgcgaagaggtgtaccagagcg

SEQ ID NO: 1583 - DNA, 41 bp, synthetic construct
  source 1..41: mol_type = other DNA
cgctctggtacacctcttcgcagctctcgaacttgtagggc

SEQ ID NO: 1584 - DNA, 42 bp, synthetic construct
  source 1..42: mol_type = other DNA
aagtacaacccagagatccactgggtggaaagcgagctgaag

SEQ ID NO: 1585 - DNA, 42 bp, synthetic construct
  source 1..42: mol_type = other DNA
cttcagctcgctttccacccagtggatctctgggttgtactt

SEQ ID NO: 1586 - DNA, 39 bp, synthetic construct
  source 1..39: mol_type = other DNA
cgtgacccagaagcctggcagcaccaagaagatcaagct

SEQ ID NO: 1587 - DNA, 39 bp, synthetic construct
  source 1..39: mol_type = other DNA
agcttgatcttcttggtgctgccaggcttctgggtcacg

SEQ ID NO: 1588 - DNA, 44 bp, synthetic construct
  source 1..44: mol_type = other DNA
cgtgacccagaagccttaccccaccaagaagatcaagctgaact

SEQ ID NO: 1589 - DNA, 44 bp, synthetic construct
  source 1..44: mol_type = other DNA
agttcagcttgatcttcttggtggggtaaggcttctgggtcacg

SEQ ID NO: 1590 - DNA, 40 bp, synthetic construct
  source 1..40: mol_type = other DNA
gaagccttacagcaccaagcccatcaagctgaacttcggc

SEQ ID NO: 1591 - DNA, 40 bp, synthetic construct
  source 1..40: mol_type = other DNA
gccgaagttcagcttgatgggcttggtgctgtaaggcttc

SEQ ID NO: 1592 - DNA, 41 bp, synthetic construct
  source 1..41: mol_type = other DNA
gccttacagcaccaagaagcccaagctgaacttcggcatcc

SEQ ID NO: 1593 - DNA, 41 bp, synthetic construct
  source 1..41: mol_type = other DNA
ggatgccgaagttcagcttgggcttcttggtgctgtaaggc

SEQ ID NO: 1594 - DNA, 43 bp, synthetic construct
  source 1..43: mol_type = other DNA
cttacagcaccaagaagatcaagatgaacttcggcatccccac

SEQ ID NO: 1595 - DNA, 43 bp, synthetic construct
  source 1..43: mol_type = other DNA
gtggggatgccgaagttcatcttgatcttcttggtgctgtaag

SEQ ID NO: 1596 - DNA, 41 bp, synthetic construct
  source 1..41: mol_type = other DNA
caccaagaagatcaagctgaacgccggcatccccacactgg

SEQ ID NO: 1597 - DNA, 41 bp, synthetic construct
  source 1..41: mol_type = other DNA
ccagtgtggggatgccggcgttcagcttgatcttcttggtg

SEQ ID NO: 1598 - DNA, 40 bp, synthetic construct
  source 1..40: mol_type = other DNA
ctgtactacctgggcatcttcgaggccaagaacaagcccg

SEQ ID NO: 1599 - DNA, 40 bp, synthetic construct
  source 1..40: mol_type = other DNA
cgggcttgttcttggcctcgaagatgcccaggtagtacag

SEQ ID NO: 1600 - DNA, 41 bp, synthetic construct
  source 1..41: mol_type = other DNA
gaagaacctgttcagcgagcccaacctcaaggacatcgtgc

SEQ ID NO: 1601 - DNA, 41 bp, synthetic construct
  source 1..41: mol_type = other DNA
gcacgatgtccttgaggttgggctcgctgaacaggttcttc

SEQ ID NO: 1602 - DNA, 40 bp, synthetic construct
  source 1..40: mol_type = other DNA
aacctgttcagcgaggaaaccctcaaggacatcgtgctga

SEQ ID NO: 1603 - DNA, 40 bp, synthetic construct
  source 1..40: mol_type = other DNA
tcagcacgatgtccttgagggtttcctcgctgaacaggtt

SEQ ID NO: 1604 - DNA, 44 bp, synthetic construct
  source 1..44: mol_type = other DNA
gaagctgaacggcgagaacgagatttttttcagaaagtccagca

SEQ ID NO: 1605 - DNA, 44 bp, synthetic construct
  source 1..44: mol_type = other DNA
tgctggactttctgaaaaaaatctcgttctcgccgttcagcttc

SEQ ID NO: 1606 - DNA, 49 bp, synthetic construct
  source 1..49: mol_type = other DNA
gatttttttcagaaagtccagcatcggcaaccccatcatccacaaaaag

SEQ ID NO: 1607 - DNA, 49 bp, synthetic construct
  source 1..49: mol_type = other DNA
ctttttgtggatgatggggttgccgatgctggactttctgaaaaaaatc

SEQ ID NO: 1608 - DNA, 40 bp, synthetic construct
  source 1..40: mol_type = other DNA
tccagcatcaagaacccctggatccacaaaaagggcagca

SEQ ID NO: 1609 - DNA, 40 bp, synthetic construct
  source 1..40: mol_type = other DNA
tgctgccctttttgtggatccaggggttcttgatgctgga

SEQ ID NO: 1610 - DNA, 44 bp, synthetic construct
  source 1..44: mol_type = other DNA
catccagattgtgcggaaggccatccccgagaacatctatcaag

SEQ ID NO: 1611 - DNA, 44 bp, synthetic construct
  source 1..44: mol_type = other DNA
cttgatagatgttctcggggatggccttccgcacaatctggatg

SEQ ID NO: 1612 - DNA, 48 bp, synthetic construct
  source 1..48: mol_type = other DNA
ccaccaatatcgtgaaggaccggcggtatacctacgataagtacttcc

SEQ ID NO: 1613 - DNA, 48 bp, synthetic construct
  source 1..48: mol_type = other DNA
ggaagtacttatcgtaggtataccgccggtccttcacgatattggtgg

SEQ ID NO: 1614 - DNA, 47 bp, synthetic construct
  source 1..47: mol_type = other DNA
gtgaaggactaccggtataccaaggataagtacttcctgcacatgcc

SEQ ID NO: 1615 - DNA, 47 bp, synthetic construct
  source 1..47: mol_type = other DNA
ggcatgtgcaggaagtacttatccttggtataccggtagtccttcac

SEQ ID NO: 1616 - DNA, 43 bp, synthetic construct
  source 1..43: mol_type = other DNA
gactaccggtatacctacgataagctgttcctgcacatgccca

SEQ ID NO: 1617 - DNA, 43 bp, synthetic construct
  source 1..43: mol_type = other DNA
tgggcatgtgcaggaacagcttatcgtaggtataccggtagtc

SEQ ID NO: 1618 - DNA, 46 bp, synthetic construct
  source 1..46: mol_type = other DNA
gcttcaacatcgtgaatggcatcgactaccagatcaaactgaagca

SEQ ID NO: 1619 - DNA, 46 bp, synthetic construct
  source 1..46: mol_type = other DNA
tgcttcagtttgatctggtagtcgatgccattcacgatgttgaagc

SEQ ID NO: 1620 - DNA, 43 bp, synthetic construct
  source 1..43: mol_type = other DNA
cttcaagaaaggccgcttcggcgtggaaagacaggtctaccag

SEQ ID NO: 1621 - DNA, 43 bp, synthetic construct
  source 1..43: mol_type = other DNA
ctggtagacctgtctttccacgccgaagcggcctttcttgaag

SEQ ID NO: 1622 - RNA, 45 nt, synthetic construct
  source 1..45: mol_type = other RNA
tttttaatttctactcttgtagatgacccctaagggaagaatgag

SEQ ID NO: 1623 - RNA, 45 nt, synthetic construct
  source 1..45: mol_type = other RNA
tttttaatttctactcttgtagatgcacgaagctctccgatgtgt

SEQ ID NO: 1624 - RNA, 45 nt, synthetic construct
  source 1..45: mol_type = other RNA
tttttaatttctactcttgtagattgatgtgagattttccacctg

SEQ ID NO: 1625 - RNA, 45 nt, synthetic construct
  source 1..45: mol_type = other RNA
tttttaatttctactcttgtagatcagatacgaacctaaactttc

SEQ ID NO: 1626 - RNA, 45 nt, synthetic construct
  source 1..45: mol_type = other RNA
tttttaatttctactcttgtagattcacagcccaagatagttaag

SEQ ID NO: 1627 - RNA, 45 nt, synthetic construct
  source 1..45: mol_type = other RNA
tttttaatttctactcttgtagatccggcctttttaccttggggc

SEQ ID NO: 1628 - RNA, 45 nt, synthetic construct
  source 1..45: mol_type = other RNA
tttttaatttctactcttgtagatactgacagcgtgaacaggtag

SEQ ID NO: 1629 - RNA, 45 nt, synthetic construct
  source 1..45: mol_type = other RNA
tttttaatttctactcttgtagatgagtctctcagctggtacacg

SEQ ID NO: 1630 - DNA, 50 bp, synthetic construct
  source 1..50: mol_type = other DNA
acactctttccctacacgacgctcttccgatctgctgtcacactccagtt

SEQ ID NO: 1631 - DNA, 50 bp, synthetic construct
  source 1..50: mol_type = other DNA
gtgactggagttcagacgtgtgctcttccgatctacccagtgtccacaag

SEQ ID NO: 1632 - DNA, 50 bp, synthetic construct
  source 1..50: mol_type = other DNA
acactctttccctacacgacgctcttccgatctagcttgtccgtctggtt

SEQ ID NO: 1633 - DNA, 50 bp, synthetic construct
  source 1..50: mol_type = other DNA
gtgactggagttcagacgtgtgctcttccgatctagactccccagacagg

SEQ ID NO: 1634 - DNA, 56 bp, synthetic construct
  source 1..56: mol_type = other DNA
acactctttccctacacgacgctcttccgatctcatgatagtcactgacaacaacg

SEQ ID NO: 1635 - DNA, 55 bp, synthetic construct
  source 1..55: mol_type = other DNA
gtgactggagttcagacgtgtgctcttccgatctcttaccatacagccacacaga

SEQ ID NO: 1636 - DNA, 51 bp, synthetic construct
  source 1..51: mol_type = other DNA
acactctttccctacacgacgctcttccgatctacatgcaagcccataacc

SEQ ID NO: 1637 - DNA, 53 bp, synthetic construct
  source 1..53: mol_type = other DNA
gtgactggagttcagacgtgtgctcttccgatctggtttgctctcagagctta

SEQ ID NO: 1638 - DNA, 56 bp, synthetic construct
  source 1..56: mol_type = other DNA
acactctttccctacacgacgctcttccgatctcatccgacattgaagttgactta

SEQ ID NO: 1639 - DNA, 57 bp, synthetic construct
  source 1..57: mol_type = other DNA
gtgactggagttcagacgtgtgctcttccgatctctactcatacacaactttcagca

SEQ ID NO: 1640 - DNA, 52 bp, synthetic construct
  source 1..52: mol_type = other DNA
acactctttccctacacgacgctcttccgatcttgggattcctacacaatgc

SEQ ID NO: 1641 - DNA, 54 bp, synthetic construct
  source 1..54: mol_type = other DNA
gtgactggagttcagacgtgtgctcttccgatctcccatccccaattcagaatg

SEQ ID NO: 1642 - DNA, 51 bp, synthetic construct
  source 1..51: mol_type = other DNA
acactctttccctacacgacgctcttccgatctcacaaggctgaccacatc

SEQ ID NO: 1643 - DNA, 53 bp, synthetic construct
  source 1..53: mol_type = other DNA
gtgactggagttcagacgtgtgctcttccgatctcagaaggcacgttcttagt

SEQ ID NO: 1644 - DNA, 55 bp, synthetic construct
  source 1..55: mol_type = other DNA
acactctttccctacacgacgctcttccgatctatcctcttgtcccacagatatc

SEQ ID NO: 1645 - DNA, 55 bp, synthetic construct
  source 1..55: mol_type = other DNA
gtgactggagttcagacgtgtgctcttccgatctccatagacctcatgtctagca

SEQ ID NO: 1646 - DNA, 53 bp, synthetic construct
  source 1..53: mol_type = other DNA
acgtcactcagaagccgggctcaactaaaaagatcaagttaaattttggaatt

SEQ ID NO: 1647 - DNA, 53 bp, synthetic construct
  source 1..53: mol_type = other DNA
aattccaaaatttaacttgatctttttagttgagcccggcttctgagtgacgt

SEQ ID NO: 1648 - DNA, 54 bp, synthetic construct
  source 1..54: mol_type = other DNA
cgtcactcagaagccgtacccgactaaaaagatcaagttaaattttggaattcc

SEQ ID NO: 1649 - DNA, 54 bp, synthetic construct
  source 1..54: mol_type = other DNA
ggaattccaaaatttaacttgatctttttagtcgggtacggcttctgagtgacg

SEQ ID NO: 1650 - DNA, 54 bp, synthetic construct
  source 1..54: mol_type = other DNA
cagcaacaaacattgtgaaagaccgtcgctacacttacgataagtactttttac

SEQ ID NO: 1651 - DNA, 54 bp, synthetic construct
  source 1..54: mol_type = other DNA
gtaaaaagtacttatcgtaagtgtagcgacggtctttcacaatgtttgttgctg

SEQ ID NO: 1652 - DNA, 60 bp, synthetic construct; identical to SEQ ID NO: 1574
  source 1..60: mol_type = other DNA

SEQ ID NO: 1653 - DNA, 60 bp, synthetic construct; identical to SEQ ID NO: 1575
  source 1..60: mol_type = other DNA

SEQ ID NO: 1654 - DNA, 51 bp, synthetic construct
  source 1..51: mol_type = other DNA
ctcagaagccgtactcaactccgaagatcaagttaaattttggaattccga

SEQ ID NO: 1655 - DNA, 51 bp, synthetic construct
  source 1..51: mol_type = other DNA
tcggaattccaaaatttaacttgatcttcggagttgagtacggcttctgag

SEQ ID NO: 1656 - RNA, 41 nt, synthetic construct
  source 1..41: mol_type = other RNA
ttaatttctactcttgtagatgacccctaagggaagaatga

SEQ ID NO: 1657 - RNA, 41 nt, synthetic construct
  source 1..41: mol_type = other RNA
ttaatttctactcttgtagatccgatattcctcaggtactc

SEQ ID NO: 1658 - RNA, 41 nt, synthetic construct
  source 1..41: mol_type = other RNA
ttaatttctactcttgtagatactttccattctctgctgga

SEQ ID NO: 1659 - RNA, 41 nt, synthetic construct
  source 1..41: mol_type = other RNA
ttaatttctactcttgtagatctgaattgctatgtgtctgg

SEQ ID NO: 1660 - RNA, 41 nt, synthetic construct
  source 1..41: mol_type = other RNA
ttaatttctactcttgtagatatccatccgacattgaagtt

SEQ ID NO: 1661 - RNA, 41 nt, synthetic construct
  source 1..41: mol_type = other RNA
ttaatttctactcttgtagattcacagcccaagatagttaa

SEQ ID NO: 1662 - RNA, 41 nt, synthetic construct
  source 1..41: mol_type = other RNA
ttaatttctactcttgtagatccggcctttttaccttgggg

SEQ ID NO: 1663 - RNA, 41 nt, synthetic construct
  source 1..41: mol_type = other RNA
ttaatttctactcttgtagatactgacagcgtgaacaggta

SEQ ID NO: 1664 - RNA, 41 nt, synthetic construct
  source 1..41: mol_type = other RNA
ttaatttctactcttgtagatgcacgaagctctccgatgtg

SEQ ID NO: 1665 - RNA, 41 nt, synthetic construct
  source 1..41: mol_type = other RNA
ttaatttctactcttgtagattgatgtgagattttccacct

SEQ ID NO: 1666 - RNA, 41 nt, synthetic construct
  source 1..41: mol_type = other RNA
ttaatttctactcttgtagatcagatacgaacctaaacttt

SEQ ID NO: 1667 - RNA, 41 nt, synthetic construct
  source 1..41: mol_type = other RNA
ttaatttctactcttgtagatgagtctctcagctggtacac
